(19) United States
(12) Patent Application Publication
(10) Pub. No.: US 2024/0268394 A1
(43) Pub. Date: Aug. 15, 2024

(54) BACTERIAL STRAINS THAT ENHANCE CROP LEGUME PLANT GROWTH

(71) Applicant: VIRGINIA TECH INTELLECTUAL PROPERTIES, INC., Blacksburg, VA (US)

(72) Inventors: Mark A. Williams, Blacksburg, VA (US); Roland Griggs, Christiansburg, VA (US); Hazem Sharaf, Bkacksburg, VA (US); Connor Doyle, Blacksburg, VA (US)

(21) Appl. No.: 18/567,887

(22) PCT Filed: Jun. 8, 2022
(86) PCT No.: PCT/US2022/072811

§ 371 Date: Dec. 7, 2023

Related U.S. Application Data
(60) Provisional application No. 63/208,208, filed on Jun. 8, 2021.

(51) Int. Cl. A01N 63/27; A01P 21/00; C12N 1/20; C12R 1/38

(52) U.S. Cl. CPC A01N 63/27; A01P 21/00; C12N 1/205; C12R 2001/38

(57) ABSTRACT

Disclosed herein are compositions containing Pseudomonas strains referred to herein as Bullseye and Pancake and/or extracts from Pseudomonas strain cultures and methods of making and using the same. Also disclosed herein are methods for increasing crop legume plant growth using the disclosed compositions. The compositions are effective as well as environmentally benign and are not detrimental to human or animal health. Also disclosed are methods for extracting plant growth promoting rhizobacteria (PGPR) from nodules of a soybean plant.

### CROSS-REFERENCE TO RELATED APPLICATIONS

[0001] This application claims benefit of U.S. Provisional Application No. 63/208,208, filed Jun. 8, 2021, which is hereby incorporated herein by reference in its entirety.

### SEQUENCE LISTING

[0002] This application contains a sequence listing filed in electronic form as an ASCII.txt file entitled “222204_2580_Sequence_Listing_ST25” created on Jun. 8, 2022 and having 33,359,087 bytes. The content of the sequence listing is incorporated herein in its entirety.

### BACKGROUND

[0003] Soybeans are one of the most commonly grown crops in the world, and nitrogen-fixing bacteria colonize the roots of soybeans and initiate the formation of spherical nodules attached to the roots. Inside the nodules, these bacteria convert atmospheric nitrogen to plant-available forms in exchange for sugar from the plant, and such bacteria reduce the need to add nitrogen fertilizer to agricultural fields. Other non-nitrogen-fixing bacteria also reside in nodules, but their role in the nodule is not well understood.

### SUMMARY

[0004] In accordance with the purpose(s) of the present disclosure, as embodied and broadly described herein, the disclosure, in one aspect, relates to compositions containing Pseudomonas strains referred to herein as Pseudomonas nodulensis MW1 (Pancake, PAMW1), Pseudomonas nodulensis MW2 (Bullseye, BUMW2), Pseudomonas nodulensis MW3 (Starfish, STMW3), Pseudomonas nodulensis MW4 (Jellyfish, JEMW4), respectively.

[0005] In some embodiments, the Pseudomonas nodulensis MW1 (Pancake, PAMW1) microbial strain is the strain deposited with the WDCM as WDCM1247. In some embodiments, the Pseudomonas nodulensis MW2 (Bullseye, BUMW2) microbial strain is the strain deposited with the WDCM as WDCM1248. In some embodiments, the Pseudomonas nodulensis MW4 (Jellyfish, JEMW4) microbial strain is the strain deposited with the WDCM as WDCM1247.

[0006] Therefore, also disclosed herein is a composition comprising a microbial strain comprising a genome having DNA sequences exhibiting at least 85, 86, 87, 88, 89, 90, 91, 92, 93, 94, 95, 96, 97, 98, 99, 99.5, or 100% sequence identity to one or more of SEQ ID NOs: 1-31 (Pancake, PAMW1) or an extract produced by culturing the microbial strain, or any combination thereof; and at least one excipient, diluent, or carrier.

[0007] Also disclosed herein is a composition comprising a microbial strain comprising a genome having DNA sequences exhibiting at least 85, 86, 87, 88, 89, 90, 91, 92, 93, 94, 95, 96, 97, 98, 99, 99.5, or 100% sequence identity to one or more of SEQ ID NO:32-76 (Bullseye, BUMW2), or an extract produced by culturing the microbial strain, or any combination thereof; and at least one excipient, diluent, or carrier.

[0008] Also disclosed herein is a composition comprising a microbial strain comprising a genome having DNA sequences exhibiting at least 85, 86, 87, 88, 89, 90, 91, 92, 93, 94, 95, 96, 97, 98, 99, 99.5, or 100% sequence identity to one or more of SEQ ID NO:77-107 (Starfish, STMW3), or an extract produced by culturing the microbial strain, or any combination thereof; and at least one excipient, diluent, or carrier.

[0009] Also disclosed herein is a composition comprising a microbial strain comprising a genome having DNA sequences exhibiting at least 85, 86, 87, 88, 89, 90, 91, 92, 93, 94, 95, 96, 97, 98, 99, 99.5, or 100% sequence identity to one or more of SEQ ID NO: 108-137 (Jellyfish, JEMW4), or an extract produced by culturing the microbial strain, or any combination thereof; and at least one excipient, diluent, or carrier.

[0010] Also disclosed are crop legume seeds, such as soybean or edamame seeds, coated with the disclosed compositions.

[0011] Also disclosed herein are methods for increasing crop legume plant growth using the disclosed compositions. The compositions are effective as well as environmentally benign and are not detrimental to human or animal health.

[0012] Also disclosed herein are methods for extracting plant growth promoting rhizobacteria (PGPR) from nodules of a crop legume plant.

[0013] Other systems, methods, features, and advantages of the present disclosure will be or become apparent to one with skill in the art upon examination of the following drawings and detailed description. It is intended that all such additional systems, methods, features, and advantages be included within this description, be within the scope of the present disclosure, and be protected by the accompanying claims. In addition, all optional and preferred features and modifications of the described embodiments are usable in all aspects of the disclosure taught herein. Furthermore, the individual features of the dependent claims, as well as all optional and preferred features and modifications of the described embodiments are combinable and interchangeable with one another.

[0014] The details of one or more embodiments of the invention are set forth in the accompanying drawings and the description below. Other features, objects, and advantages of the invention will be apparent from the description and drawings, and from the claims.

### DESCRIPTION OF DRAWINGS

[0015] FIG. 1. Colony morphologies of bacteria used in this study: (A) Bullseye, (B) Pancake, and (C) Starfish grown on, modified LB agar (blue mark is permanent marker on the outside of the plate, not part of the colony).

[0016] FIG. 2. Experimental design showing the treatment types and number of treatment repetitions for each soybean cultivar.

[0017] FIG. 3. Principal coordinate analysis of Bray-Curtis dissimilarity from the 1st harvest showing the effect of, treatments on indices growth, yield, and nitrogen fixation. Figures are labeled as follows: (A) unrelativized Asgrow, data, (B) relativized Asgrow data, (C) unrelativized Pioneer data, and (D) relativized Pioneer data (D) Treatments, are labeled according to cultivar (Ag=Asgrow, Pi=Pioneer) and Bacteria (B=Bullseye, P=Pancake, S=, Starfish, C=Control).

[0018] FIG. 4. Canonical correspondence analysis of unrelativized data from 1st harvest showing the effect of treatments, on indices of growth, yield, and nitrogen fixation. Figures are labeled as follows: (A) Asgrow (B) Pioneer, Treatments are labeled according to cultivar (Ag=Asgrow, Pi=Pioneer) and Bacteria (B=Bullseye, P=, Pancake, S=Starfish, C=Control).

[0019] FIG. 5. Mean values of first harvest response variables that showed significant differences between cultivars: (A), SPAD, (B) stomatal conductance, and (C) nodule number per plant for Asgrow (Ag) and Pioneer (Pi) soybeans, following 1st harvest.

[0020] FIG. 6. Mean root length of soybeans treated with Bullseye (B), Pancake (P), Starfish, (S) and uninoculated, controls (C). Bars indicate standard error.

[0021] FIG. 7. Bray-Curtis ordination plots for the 2nd Harvest showed the effect of treatments on indices of growth, yield, and nitrogen fixation. Figures are labeled as follows: (A) unrelativized Asgrow data, (B) relativized Asgrow, data, (C) unrelativized Pioneer data, and (D) relativized Pioneer data (D) Treatments are labeled according to, cultivar (Ag=Asgrow, Pi=Pioneer) and Bacteria (B=Bullseye, P=Pancake, S=Starfish, C=Control).

[0022] FIG. 8. Canonical correspondence analysis of unrelativized data from 2nd harvest showing the effect of treatments on indices of growth, yield, and nitrogen fixation. Figures are labeled as follows: (A) Asgrow (B) Pioneer. Treatments are labeled according to cultivar (Ag=Asgrow, Pi=Pioneer) and Bacteria (B=Bullseye, P=Pancake, S=Starfish, C=Control).

[0023] FIG. 9. Mean values of second harvest response variables that showed significant differences between cultivars: (A) SPAD, (B) height, (C) root wet mass, (D) nodules per plant, (E) root dry mass, (F) shoot-to-root mass ratio, (G) seeds per plant.

[0024] FIG. 10. (A) A representative blue CAS agar plate two days after inoculation showing all three inoculants solubilize Fe as indicated by the orange halos surrounding the colonies. Starting in the top right quadrant and moving in a clockwise direction, inoculant strains are positioned as follows: Control, Bullseye, Pancake, Starfish. (B) Transparent halos surrounding colonies grown on a representative NBRIP plate 14 days after inoculation indicate all three strains solubilize P. The relative order of bacteria on the plate is the same as that in image A.

[0025] FIG. 11. Comparison of average treatment means for plants treated with Bullseye (B), Pancake (P), Starfish (S) and controls (C). Treatment means for each response variable measured during the 1st harvest are shown: (A) SPAD, (B) stomatal conductance, (C) height, (D) flowers per plant, (E) trifoliates per plant, (F) trifoliate length, (G) volumetric water content, (H) root length, (I) root wet mass, (J) shoot wet mass, (K) nodules per plant, (L) nodule mass, (M) total wet mass, (N) shoot dry mass, (O) root dry mass, (P) total dry mass, and (Q) shoot-to-root mass ratio.

[0026] FIG. 12. Second Harvest comparison of average treatment means for plants treated with Bullseye (B), Pancake (P), Starfish (S) and controls (C). Treatment means for each response variable measured during the 2nd harvest are shown: (A) SPAD, (B) height, (C) pods per plant, (D) root length, (E) root wet mass, (F) shoot wet mass, (G) nodules per plant, (H) nodule mass, (I) total wet mass, (J) shoot dry mass, (K) root dry mass, (L) total dry mass, (M) shoot-to-root mass ratio, (N) pod wet mass, (O) seeds per plant, (P) grain dry mass, (Q) number of auxiliary branches, (R) aboveground wet mass, (S) pod dry mass, (T) aboveground dry mass, (U) seed oil content, and (V) seed protein content.

### DETAILED DESCRIPTION

[0027] Disclosed herein are compositions and methods for promoting soybean plant growth, the methods including applying to a soybean seed or plant an effective amount of a composition, wherein the composition includes a microbial strain comprising a DNA sequence exhibiting 85, 86, 87, 88, 89, 90, 91, 92, 93, 94, 95, 96, 97, 98, 99, 99.5, or 100% whole genome average nucleotide sequence identity or more to at least one of SEQ ID NOs: 1-2, an extract produced by culturing the microbial strain, or any combination thereof. In a further aspect, the microbial strain can be related to Pseudomonas azotoformans strain Pancake and/or Pseudomonas azotoformans strain Bullseye derived from soybean cultivar 5002T. These strains are referred to herein as Pseudomonas nodulensis MW1 and Pseudomonas nodulensis MW2, respectively. In some embodiments, the Pseudomonas nodulensis MW1 microbial strain is the strain deposited with the WFCC as WDCM1247. In some embodiments, the Pseudomonas nodulensis MW2 microbial strain is the strain deposited with the WFCC as WDCM1248.

[0028] Many modifications and other embodiments disclosed herein will come to mind to one skilled in the art to which the disclosed compositions and methods pertain having the benefit of the teachings presented in the foregoing descriptions and the associated drawings. Therefore, it is to be understood that the disclosures are not to be limited to the specific embodiments disclosed and that modifications and other embodiments are intended to be included within the scope of the appended claims. The skilled artisan will recognize many variants and adaptations of the aspects described herein. These variants and adaptations are intended to be included in the teachings of this disclosure and to be encompassed by the claims herein.

[0029] Before the present disclosure is described in greater detail, it is to be understood that this disclosure is not limited to particular embodiments described, and as such may, of course, vary. It is also to be understood that the terminology used herein is for the purpose of describing particular embodiments only, and is not intended to be limiting, since the scope of the present disclosure will be limited only by the appended claims.

[0030] Where a range of values is provided, it is understood that each intervening value, to the tenth of the unit of the lower limit unless the context clearly dictates otherwise, between the upper and lower limit of that range and any other stated or intervening value in that stated range, is encompassed within the disclosure. The upper and lower limits of these smaller ranges may independently be included in the smaller ranges and are also encompassed within the disclosure, subject to any specifically excluded limit in the stated range. Where the stated range includes one or both of the limits, ranges excluding either or both of those included limits are also included in the disclosure.

[0031] Unless defined otherwise, all technical and scientific terms used herein have the same meaning as commonly understood by one of ordinary skill in the art to which this disclosure belongs. Although any methods and materials similar or equivalent to those described herein can also be used in the practice or testing of the present disclosure, the preferred methods and materials are now described.

[0032] All publications and patents cited in this specification are herein incorporated by reference as if each individual publication or patent were specifically and individually indicated to be incorporated by reference and are incorporated herein by reference to disclose and describe the methods and/or materials in connection with which the publications are cited. The citation of any publication is for its disclosure prior to the filing date and should not be construed as an admission that the present disclosure is not entitled to antedate such publication by virtue of prior disclosure. Further, the dates of publication provided could be different from the actual publication dates that may need to be independently confirmed.

[0033] As will be apparent to those of skill in the art upon reading this disclosure, each of the individual embodiments described and illustrated herein has discrete components and features which may be readily separated from or combined with the features of any of the other several embodiments without departing from the scope or spirit of the present disclosure. Any recited method can be carried out in the order of events recited or in any other order that is logically possible.

[0034] Embodiments of the present disclosure will employ, unless otherwise indicated, techniques of chemistry, biology, and the like, which are within the skill of the art.

[0035] The following examples are put forth so as to provide those of ordinary skill in the art with a complete disclosure and description of how to perform the methods and use the probes disclosed and claimed herein. Efforts have been made to ensure accuracy with respect to numbers (e.g., amounts, temperature, etc.), but some errors and deviations should be accounted for. Unless indicated otherwise, parts are parts by weight, temperature is in ° C., and pressure is at or near atmospheric. Standard temperature and pressure are defined as 20° C. and 1 atmosphere.

[0036] Before the embodiments of the present disclosure are described in detail, it is to be understood that, unless otherwise indicated, the present disclosure is not limited to particular materials, reagents, reaction materials, manufacturing processes, or the like, as such can vary. It is also to be understood that the terminology used herein is for purposes of describing particular embodiments only, and is not intended to be limiting. It is also possible in the present disclosure that steps can be executed in different sequence where this is logically possible.

[0037] As will be apparent to those of skill in the art upon reading this disclosure, each of the individual embodiments described and illustrated herein has discrete components and features which may be readily separated from or combined with the features of any of the other several embodiments without departing from the scope or spirit of the present disclosure.

[0038] Any recited method can be carried out in the order of events recited or in any other order that is logically possible. That is, unless otherwise expressly stated, it is in no way intended that any method or aspect set forth herein be construed as requiring that its steps be performed in a specific order. Accordingly, where a method claim does not specifically state in the claims or descriptions that the steps are to be limited to a specific order, it is no way intended that an order be inferred, in any respect. This holds for any possible non-express basis for interpretation, including matters of logic with respect to arrangement of steps or operational flow, plain meaning derived from grammatical organization or punctuation, or the number or type of aspects described in the specification.

[0039] All publications mentioned herein are incorporated herein by reference to disclose and describe the methods and/or materials in connection with which the publications are cited. The publications discussed herein are provided solely for their disclosure prior to the filing date of the present application. Nothing herein is to be construed as an admission that the present invention is not entitled to antedate such publication by virtue of prior invention. Further, the dates of publication provided herein can be different from the actual publication dates, which can require independent confirmation.

[0040] While aspects of the present disclosure can be described and claimed in a particular statutory class, such as the system statutory class, this is for convenience only and one of skill in the art will understand that each aspect of the present disclosure can be described and claimed in any statutory class.

[0041] It is also to be understood that the terminology used herein is for the purpose of describing particular aspects only and is not intended to be limiting. Unless defined otherwise, all technical and scientific terms used herein have the same meaning as commonly understood by one of ordinary skill in the art to which the disclosed compositions and methods belong. It will be further understood that terms, such as those defined in commonly used dictionaries, should be interpreted as having a meaning that is consistent with their meaning in the context of the specification and relevant art and should not be interpreted in an idealized or overly formal sense unless expressly defined herein.

### Definitions

[0042] Prior to describing the various aspects of the present disclosure, the following definitions are provided and should be used unless otherwise indicated. Additional terms may be defined elsewhere in the present disclosure.

[0043] It must be noted that, as used in the specification and the appended claims, the singular forms “a,” “an,” and “the” include plural referents unless the context clearly dictates otherwise.

[0044] As used herein, “comprising” is to be interpreted as specifying the presence of the stated features, integers, steps, or components as referred to, but does not preclude the presence or addition of one or more features, integers, steps, or components, or groups thereof. Moreover, each of the terms “by”, “comprising,” “comprises”, “comprised of,” “including,” “includes,” “included,” “involving,” “involves,” “involved,” and “such as” are used in their open, non-limiting sense and may be used interchangeably. Further, the term “comprising” is intended to include examples and aspects encompassed by the terms “consisting essentially of” and “consisting of.” Similarly, the term “consisting essentially of” is intended to include examples encompassed by the term “consisting of.

[0045] As used in the specification and the appended claims, the singular forms “a,” “an” and “the” include plural referents unless the context clearly dictates otherwise. Thus, for example, reference to “a plant,” “a leaf,” or “an excipient,” includes, but is not limited to, collections, mixtures, or combinations of two or more such plants, leaves, or excipients, and the like.

[0046] It should be noted that ratios, concentrations, amounts, and other numerical data can be expressed herein in a range format. It will be further understood that the endpoints of each of the ranges are significant both in relation to the other endpoint, and independently of the other endpoint. It is also understood that there are a number of values disclosed herein, and that each value is also herein disclosed as “about” that particular value in addition to the value itself. For example, if the value “10” is disclosed, then “about 10” is also disclosed. Ranges can be expressed herein as from “about” one particular value, and/or to “about” another particular value. Similarly, when values are expressed as approximations, by use of the antecedent “about,” it will be understood that the particular value forms a further aspect. For example, if the value “about 10” is disclosed, then “10” is also disclosed.

[0047] When a range is expressed, a further aspect includes from the one particular value and/or to the other particular value. For example, where the stated range includes one or both of the limits, ranges excluding either or both of those included limits are also included in the disclosure, e.g. the phrase “x to y” includes the range from ‘x’ to ‘y’ as well as the range greater than ‘x’ and less than ‘y’. The range can also be expressed as an upper limit, e.g. ‘about x, y, z, or less’ and should be interpreted to include the specific ranges of ‘about x’, ‘about y’, and ‘about z’ as well as the ranges of ‘less than x’, less than y′, and ‘less than z’. Likewise, the phrase ‘about x, y, z, or greater’ should be interpreted to include the specific ranges of ‘about x’, ‘about y’, and ‘about z’ as well as the ranges of ‘greater than x’, greater than y′, and ‘greater than z’. In addition, the phrase “about ‘x’ to ‘y’”, where ‘x’ and ‘y’ are numerical values, includes “about ‘x’ to about ‘y’”.

[0048] It is to be understood that such a range format is used for convenience and brevity, and thus, should be interpreted in a flexible manner to include not only the numerical values explicitly recited as the limits of the range, but also to include all the individual numerical values or sub-ranges encompassed within that range as if each numerical value and sub-range is explicitly recited. To illustrate, a numerical range of “about 0.1% to 5%” should be interpreted to include not only the explicitly recited values of about 0.1% to about 5%, but also include individual values (e.g., about 1%, about 2%, about 3%, and about 4%) and the sub-ranges (e.g., about 0.5% to about 1.1%; about 5% to about 2.4%; about 0.5% to about 3.2%, and about 0.5% to about 4.4%, and other possible sub-ranges) within the indicated range.

[0049] As used herein, the terms “about,” “approximate,” “at or about,” and “substantially” mean that the amount or value in question can be the exact value or a value that provides equivalent results or effects as recited in the claims or taught herein. That is, it is understood that amounts, sizes, formulations, parameters, and other quantities and characteristics are not and need not be exact, but may be approximate and/or larger or smaller, as desired, reflecting tolerances, conversion factors, rounding off, measurement error and the like, and other factors known to those of skill in the art such that equivalent results or effects are obtained. In some circumstances, the value that provides equivalent results or effects cannot be reasonably determined. In such cases, it is generally understood, as used herein, that “about” and “at or about” mean the nominal value indicated±10% variation unless otherwise indicated or inferred. In general, an amount, size, formulation, parameter or other quantity or characteristic is “about,” “approximate,” or “at or about” whether or not expressly stated to be such. It is understood that where “about,” “approximate,” or “at or about” is used before a quantitative value, the parameter also includes the specific quantitative value itself, unless specifically stated otherwise.

[0050] As used herein, the term “effective amount” refers to an amount that is sufficient to achieve the desired modification of a physical property of the composition or material. For example, an “effective amount” of an active ingredient refers to an amount that is sufficient to achieve the desired improvement in the property modulated by the formulation component, e.g. achieving the desired level of growth promotion. The specific level in terms of wt % in a composition required as an effective amount will depend upon a variety of factors including the amount and type of the herein described Pseudomonas species metabolites in the composition and/or presence of live cells, amount and type of any carriers or excipients, conditions surrounding the plants to be treated, length of time since treatment and/or number of treatments to be applied, degree of infestation, and identity of the pathogen to be treated.

[0051] As used herein, the terms “optional” or “optionally” means that the subsequently described event or circumstance can or cannot occur, and that the description includes instances where said event or circumstance occurs and instances where it does not.

[0052] “Inoculum” as used herein refers to a composition containing microorganisms, wherein the composition used to pretreat a plant for the purpose of establishing a population of the microorganisms on the plant. A successful inoculum can be at an active growth stage and size and will generally be free from contamination and may include additional components useful for establishing a population of microorganisms such as, for example, culture medium, solvents, buffers, and the like. In some aspects, a bacterial inoculum is prepared to infect plants in order to assess the efficacy of disclosed treatments. In other aspects, other forms of inoculum can be used to treat plants to increase plant growth under typical or conditions of the environment that cause plant stress.

[0053] “Colony forming units” (CFU) refers to an estimate of the number of viable microorganisms (e.g., bacteria) in a sample. In one aspect, number of CFU in a sample can be established by culturing the sample on a plate and counting microbial colonies, wherein each colony is assumed to have arisen from a single cell or group of cells.

[0054] As used herein, the term “prevent” or “preventing” refers to precluding, averting, obviating, forestalling, stopping, or hindering a plant disease from infecting a plant or spreading among a plant population, especially by advance action. It is understood that where reduce, inhibit or prevent are used herein, unless specifically indicated otherwise, the use of the other two words is also expressly disclosed. In one aspect, prevention of the plant disease is associated with reduced transmission of the plant disease, either by (i) stopping the spread of the disease from one part of a plant to the rest of the plant or (ii) stopping the spread of the disease from one plant to a nearby plant. Reduced transmission and prevention can be assessed quantitatively based on knowledge in the art such as plant growth habit, conditions for disease spread in a given installation type, and the like, wherein reduced transmission or prevention results in a lower amount of spread of a disease than would ordinarily be expected.

[0055] As used herein, “increase” or “increasing” refers to making something greater in size, amount, length, or the like. Thus, in one aspect, a treatment that increases plant growth leads to an improvement in at least one growth-related quality of the plant compared to an untreated plant (e.g., the plant with increased growth is larger in size, has greater foliage area, produces more fruits, or has a longer lifetime than an untreated counterpart).

[0056] Unless otherwise specified, temperatures referred to herein are based on atmospheric pressure (i.e. one atmosphere).

### Microbial Compositions and Extracts

[0057] In one aspect, disclosed herein are compositions including a Pseudomonas Pseudomonas azotoformans strain Bullseye and/or Pancake derived from soybean cultivar 5002T that has a DNA sequence exhibiting about 85, 86, 87, 88, 89, 90, 91, 92, 93, 94, 95, 96, 97, 98, 99, 99.5, or 100% average nucleotide sequence identity to at least one of SEQ ID NOs: 1-2, or any range encompassing any of the foregoing values. In one aspect, SEQ ID NOs: 1-2 represent contigs of the genome sequence of SSG. Further in this aspect, SEQ ID NOs: 1-2 can be assembled in a sequential order to identify or elucidate one or more portions of the genome of SSG.

[0058] In another aspect, the microbial strain can be frozen, lyophilized, or present as metabolically active cells. In one aspect, the microbial strain is present in the composition in an amount of from about 109 to about 103 colony forming units (CFU) per mL, or at about 109, 108, 107, 106, 105, 104, or about 103 CFU/mL, or a combination of any of the foregoing values, or a range encompassing any of the foregoing values.

[0059] In yet another aspect, disclosed herein are extracts produced by culturing the disclosed microbial strains and/or microbial compositions. In one aspect, the extracts are substantially free of microbial cells. In another aspect, the extracts can be produced by (a) culturing the microbial strain in a culture medium and (b) filtering the culture medium. In one aspect, the culture medium can be filtered with a 0.22 μm filter

### Excipients, Diluents, Carriers, and Additional Active Ingredients

[0060] In any of these aspects, the compositions further include at least one excipient, diluent, or carrier, or any combination thereof. In another aspect, at least one excipient, diluent, or carrier can be a surfactant, a solvent, an emulsifier, a buffer, a cryoprotectant, a salt, microbial culture medium, a wetting agent, a bulking agent, an anti-caking agent, a thickener, a clay, a mineral, a lipid, a gum, a dye or colorant, a biological waste material, or any combination thereof. In some aspects, one compound or component can fit in different categories (e.g., a clay can also act as a thickener and/or a bulking agent, or a salt may also have buffering properties and/or act as a cryoprotectant, and the like).

[0061] In one aspect, the cryoprotectant can be ethylene glycol, propylene glycol, glycerol, dimethyl sulfoxide, sucrose, trehalose, or any combination thereof.

[0062] In one aspect, the clay can be a natural clay, a clay mineral, or a natural or synthetic silicate salt. In a further aspect, the clay can be selected from aluminum magnesium silicate, aluminum potassium sodium silicate, aluminum silicate, aluminum sodium silicate, attapulgite-type clay, bentonite, calcium oxide silicate, calcium silicate, Fuller's earth, kaolin, magnesium oxide silicate, magnesium silicate, magnesium silicate hydrate, montmorillonite, perlite, potassium aluminum silicate, vermiculite, wollastonite, zeolites, or any combination thereof.

[0063] In another aspect, the salt can be a salt, buffer, or any combination thereof. In one aspect, the salt can be calcium acetate, calcium citrate, calcium sulfate, citric acid, dipotassium citrate, disodium citrate, disodium sulfate, ferric oxide, ferrous oxide, iron magnesium oxide, magnesium carbonate, magnesium oxide, magnesium sulfate, potassium acetate, potassium bicarbonate, potassium chloride, potassium citrate, potassium sulfate, sodium acetate, sodium bicarbonate, sodium chloride, sodium citrate, sodium sulfate, zinc iron oxide, zinc oxide, zinc stearate, hydrates thereof, conjugate acids and/or bases thereof, and any combination thereof.

[0064] In another aspect, the mineral can be calcium carbonate, feldspar, granite, graphite, gypsum, hematite, lime, limestone, mica, mica-group minerals, nepheline syenite, pumice, shale, or any combination thereof.

[0065] In one aspect, the lipid can be one or more waxes, one or more acylglycerols, one or more triglycerides, one or more diglycerides, one or more monoglycerides, one or more fatty acids, one or more steroids, or any combination thereof. Examples of useful lipids include, but are not limited to, tristearin, glycerol behenate, glycerol monostearate, stearic acid, cholesterol, cetyl palmitate, and combinations thereof. In another aspect, the lipid can further function as an emulsifier, surfactant, detergent, wetting agent, foaming agent, dispersant, or any combination thereof.

[0066] In one aspect, the dye or colorant can be selected from chlorophyll, red cabbage color, ultramarine blue, or any combination thereof.

[0067] In another aspect, the thickener can be agar, carrageenan, or any combination thereof. In another aspect, the wax can be beeswax, carnauba wax, paraffin wax, or any combination thereof. In still another aspect, the gum can be locust bean gum, gellan gum, guar gum, gum arabic, gum tragacanth, xanthan gum, or any combination thereof.

[0068] In one aspect, the biological waste material can be almond hulls, almond shells, bone meal, bran, bread crumbs, cardboard, cellulose or a chemically-modified cellulose, citrus meal, citrus pulp, clam shells, cocoa, cocoa shell flour, cocoa shells, coffee grounds, cork, corn cobs, cracked wheat, diatomaceous earth, Douglas fir bark, egg shells, fish meal, peanut shells, peat moss, red cedar chips, sawdust, soybean hulls, soybean meal, soybean flour, walnut flour, walnut shells, wheat, or any combination thereof.

[0069] In some aspects, the surfactant can be a polysorbate such as, for example, polysorbate 20. In another aspect, the solvent can be water. In one aspect, the at least one excipient, diluent, or carrier can confer increased stability, wettability, dispersibility, or adherence to a substrate relative to a composition lacking the carrier.

[0070] In one aspect, the composition can be or include an emulsion, colloid, granule, pellet, powder, spray, suspension, or solution.

[0071] In another aspect, the composition can further include at least one additional active ingredient. In a further aspect, the additional active ingredient can be a fertilizer, a pesticide, an herbicide, or any combination thereof.

### Method for Increasing Plant Growth

[0072] Disclosed herein is a method for increasing plant growth of a crop leguminous crop, such as a soybean or edamame, the method including applying the disclosed compositions to a plant so that the treated plant has increased growth compared to an untreated plant. In some embodiments, the composition can be applied to the roots, leaves, fruits, flowers, stems, or seeds of the plant, or any combination thereof. In still another aspect, the composition can be applied to soil, compost, mulch, leaf litter, sawdust, straw, pine straw, wood chips, gravel, plant growing medium, or other material in a bed surrounding the plant.

[0073] In some embodiments, increasing plant growth can result in increased biomass of the treated plant compared to an untreated plant. In another aspect, increasing plant growth can result in increased fruit production of the treated plant compared to an untreated plant. In still another aspect, increasing plant growth can lead to increased production period of the treated plant compared to an untreated plant, or to an increased productive lifespan of the treated plant compared to an untreated plant. In yet another aspect, increasing plant growth can result in an increased foliage area of the treated plant compared to an untreated plant, wherein increased foliage area can include a greater number of leaves, a larger surface area per individual leaf, or any combination thereof. In one aspect, plant growth can be increased by from at least 35% to at least 75% compared to an untreated plant, or by about 35, 40, 45, 50, 55, 60, 65, 70, or about 75% compared to an untreated plant, or a combination of any of the foregoing values, or a range encompassing any of the foregoing values. In one aspect, plant growth increase by about 35%, about 55%, or about 75% compared to an untreated plant.

[0074] In still another aspect, disclosed herein is a method for increasing plant growth, the method including the steps of applying to a plant or to a plant growing medium an effective amount of a composition, wherein the composition includes a microbial strain that includes a DNA sequence exhibiting at least 85% sequence identity to at least one of SEQ ID NOs: 1-2, an extract produced by culturing the microbial strain, or any combination thereof, so that a treated plant has increased growth compared to an untreated plant. In another aspect, the DNA sequence can have from about 95% to about 100% sequence identity to at least one of SEQ ID NOs: 1-2, or about 95, 96, 97, 98, 99, 99.5, or about 100% sequence identity, or a combination of any of the foregoing values, or a range encompassing any of the foregoing values. Also disclosed are plants treated by the disclosed methods.

Method for Obtaining Growth Promoting Pseudomonas Derived from Soybean Cultivar 5002T

[0075] Also disclosed herein is a method for extracting plant growth promoting rhizobacteria (PGPR) from nodules of a soybean plant. In some embodiments, the soybean plant is a 5002T cultivar, or derivative thereof.

[0076] The method involves the extraction of nodule endophytes for cultivation and isolation. In some embodiments, the method first involves mechanically cleaning the external surface of the nodules to remove soil and debris without damaging the nodule barrier that protects the nodule interior. The method can then involve sterilizing the surface of the nodules with a bleach and ethanol solution to lyse and kill bacterial cells and denature DNA. The method can then involve washing the nodules to remove the bleach and ethanol by repeated washings. The method can then involve testing surface of nodules to ensure sterility, wherein if the nodules are not shown to be sterile then repeat sterilization and washing steps. The method can then involve extracting endophytes from the nodule and plating them on KBC to grow Pseudomonas spp. Note that other variations of KB media did not provide for the selective growth and diversity of colony types, so KBC is the media of choice for growth on plates and in solution. Finally, the method can involve selecting colonies for Pseudomonas with different morphologies and streaking these colonies to isolate PGPR bacterial variants.

[0077] Now having described the aspects of the present disclosure, in general, the following Examples describe some additional aspects of the present disclosure. While aspects of the present disclosure are described in connection with the following examples and the corresponding text and figures, there is no intent to limit aspects of the present disclosure to this description. On the contrary, the intent is to cover all alternatives, modifications, and equivalents included within the spirit and scope of the present disclosure.

### Aspects

[0078] The present disclosure can be described in accordance with the following numbered Aspects, which should not be confused with the claims.

[0079] Aspect 1. A composition comprising a microbial strain comprising a DNA sequence exhibiting at least 85% sequence identity to at least one of SEQ ID NOs: 1-2, an extract produced by culturing the microbial strain, or any combination thereof; and at least one excipient, diluent, or carrier.

[0080] Aspect 2. The composition of aspect 1, wherein the microbial strain is deposited with the WFCC as WDCM1247 or WDCM1248.

[0081] Aspect 3. The composition of aspect 1, wherein the DNA sequence exhibits at least 95% sequence identity to at least one of SEQ ID NO: 1 or 2.

[0082] Aspect 4. The composition of aspect 1, wherein the DNA sequence exhibits at least 99% sequence identity to at least one of SEQ ID NO:1 or 2.

[0083] Aspect 5. The composition of aspect 1, wherein the DNA sequence exhibits 100% sequence identity to at least one of SEQ ID NO: 1 or 2.

[0084] Aspect 6. The composition of any one of aspects 1 to 5, wherein the microbial strain is frozen, lyophilized, or is present as metabolically active cells.

[0085] Aspect 7. The composition of any one of aspects 1 to 6, wherein the microbial strain is present in an amount of from about 109 to about 103 colony forming units per mL.

[0086] Aspect 8. The composition of any one of aspects 1 to 6, wherein the microbial strain is present in an amount of from about 109 to about 108 colony forming units per mL.

[0087] Aspect 9. The composition of any of aspects 1 to 8, wherein the at least one excipient, diluent, or carrier confers increased stability, wettability, dispersibility, or adherence to a substrate relative to a composition lacking the carrier.

[0088] Aspect 10. The extract of any one of aspects 1 to 9, wherein the extract is produced by:
[0089] (a) culturing the microbial strain in a culture medium; and
[0090] (b) filtering the culture medium.

[0091] Aspect 11. The composition of any one of aspects 1 to 10, wherein the composition comprises an emulsion, a colloid, a granule, a pellet, a powder, a spray, a suspension, or a solution.

[0092] Aspect 12. The composition of any one of aspects 1 to 11, wherein the at least one excipient, diluent, or carrier comprises a surfactant, a solvent, an emulsifier, a buffer, a cryoprotectant, a salt, microbial culture medium, a wetting agent, a bulking agent, an anti-caking agent, a thickener, a clay, a mineral, a lipid, a gum, a dye or colorant, a biological waste material, or any combination thereof.

[0093] Aspect 13. The composition of aspect 12, wherein the surfactant comprises polysorbate 20.

[0094] Aspect 14. The composition of aspect 12 or 13, wherein the solvent comprises water.

[0095] Aspect 15. The composition of any one of aspects 1 to 14, wherein the composition further comprises an effective amount of at least one additional active ingredient.

[0096] Aspect 16. The composition of aspect 15, wherein the additional active ingredient comprises a fertilizer, a pesticide, an herbicide, or any combination thereof.

[0097] Aspect 17. A crop legume seed coated with the composition of any one of aspects 1 to 16.

[0098] Aspect 18. The crop legume seed of aspect 17, wherein the seed is a soybean or edamame seed.

[0099] Aspect 19. The crop legume seed of aspect 17 or 18, wherein the composition further comprises a binder, filler, adhesives, adjuvant, thickener, or any combination thereof.

[0100] Aspect 20. A method for increasing crop legume plant growth, the method comprising applying the composition of any one of aspects 1 to 16 to a soybean plant or seed, so that the treated plant or plant derived from the treated seed has increased growth compared to an untreated plant or plant derived from an untreated seed.

[0101] Aspect 21. The method of aspect 20, wherein the crop legume plant is a soybean or edamame plant.

[0102] Aspect 22. The method of aspect 21, wherein the soybean plant is a Glycine max species.

[0103] Aspect 23. The method of any one of aspects 20 or 22, wherein the composition is applied to the roots, leaves, fruits, flowers, stems, or seeds of the plant, or any combination thereof.

[0104] Aspect 24. The method of any one of aspects 20 to 23, wherein the composition is applied to soil, compost, mulch, leaf litter, sawdust, straw, pine straw, wood chips, gravel, plant growing medium, or other material in a bed surrounding the plant.

[0105] Aspect 25. The method of any one of aspects 20 to 24, wherein increasing soybean plant growth comprises increased biomass of the treated plant compared to an untreated plant.

[0106] Aspect 26. The method of any one of aspects 20 to 25, wherein increasing soybean plant growth comprises increased bean production of the treated soybean plant compared to an untreated plant.

[0107] Aspect 27. The method of any one of aspects 20 to 26, wherein increasing soybean plant growth comprises increased production period of the treated soybean plant compared to an untreated soybean plant.

[0108] Aspect 28. The method of any one of aspects 20 to 27, wherein performing the method increases soybean plant growth by at least 10% for the treated soybean plant or the plant derived from the treated seed compared to an untreated soybean plant or plant derived from an untreated seed.

[0109] Aspect 29. The method of any one of aspects 20 to 27, wherein performing the method increases soybean plant growth by at least 55% for the treated soybean plant or the plant derived from the treated seed compared to an untreated soybean plant or plant derived from an untreated seed.

[0110] Aspect 30. The method of any one of aspects 20 to 27, wherein performing the method increases soybean plant growth by at least 75% for the treated soybean plant or the plant derived from the treated seed compared to an untreated soybean plant or plant derived from an untreated seed.

[0111] Aspect 31. A plant treated using the method of any one of aspects claims 20 to 30.

[0112] Aspect 32. A method for extracting plant growth promoting rhizobacteria (PGPR) from nodules of a crop legume plant, comprising
[0113] (a) mechanically cleaning the external surface of the nodules to remove soil and debris without damaging the nodule barrier that protects the nodule interior;
[0114] (b) sterilizing the surface of the nodules with a bleach and ethanol solution to lyse and kill bacterial cells and denature DNA;
[0115] (c) washing the nodules to remove the bleach and ethanol by repeated washings;
[0116] (d) testing surface of nodules to ensure sterility, wherein if the nodules are not shown to be sterile then repeat sterilization and washing steps;
[0117] (e) extracting endophytes from the nodule and plating them on KBC to grow Pseudomonas spp.; and
[0118] (f) selecting colonies for Pseudomonas with different morphologies and streaking these colonies to isolate PGPR bacterial variants.

[0119] A number of embodiments of the invention have been described. Nevertheless, it will be understood that various modifications may be made without departing from the spirit and scope of the invention. Accordingly, other embodiments are within the scope of the following claims.

### EXAMPLES

### Example 1: Pseudomonas Spp. Isolated from Soybean Nodules Promote Soybean Growth and Nitrogen Fixation

### Materials and Methods

### Bacteria Isolation and Identification

[0120] Bacteria were isolated from nodules of the soybean cultivar 5002T after sterilizing the outside of nodules with sodium hypochlorite. Detailed methods for sterilization are outlined in Sharaf et al. (2019). After sterilization, the outside of select nodules were streaked onto Congo Red media to test whether or not bacteria survived the sterilization process. Sterilized nodules and 2 mL of 0.9 M NaCl solution were added to 5 ml conical tubes. A sterile rod was used to crush the nodules in the tube to suspend the bacteria from inside the nodules in solution. The tubes were then vortexed and given approximately 5 minutes to allow the nodule particles to settle prior to being stored at 4° C.

[0121] Bacteria suspended in the solution were then streaked onto plates containing KBC media (Mohan and Schaad 1987), a modified version of King's B media (King et al. 1954), to select for Pseudomonas spp. Colonies displaying different morphologies were selected and re-streaked onto new plates until new plates contained only one colony morphology. A total of four colony morphologies were identified. For the sake of clarity, bacteria displaying these four colony morphologies were named according to distinguishing features and will be referred to in this paper as Bullseye, Pancake, Starfish, and Jellyfish respectively. Jellyfish was not used during this study.

[0122] To confirm all isolated strains were in fact Pseudomonas spp., the 16 s rRNA and citrate synthase (CTS) genes were amplified then sequenced by Virginia Tech's Biocomplexity Institute (Blacksburg, VA, USA). Genomic analysis revealed all four strains were closely related members of the genus Pseudomonas spp., but it did not allow us to determine the exact species or strains of each bacterium. Consequently, differences in colony morphology were deemed sufficient evidence for treating each bacterium as a different strain during the experiment until full genome sequencing could be conducted. Pictures of each of the strains used for inoculation is shown in FIG. 1.

### Soil Preparation, Potting, Planting, and Inoculation

[0123] Field soil from Virginia Tech's Kentland Farm (37.1983ºN, 80.5747° W) was collected to be used as potting media during the experiment. The soil was taken from a field in which soybeans were grown the previous year thus ensuring an established population of Bradyrhizobium spp. was present. Additionally, soil was collected from the top 20 cm of a silt loam soil with a pH of approximately 6.0 (1:1 water/soil v/w). The soil was then mixed with perlite in approximately a 2:3 ratio by volume, and the soil-perlite mix was then used to fill 80, 5.68 L (trade size #2) pots. Approximately 800 mL of 1:1 sand:vermiculite mix was then spread on the top of the soil-perlite mix to reduce weed growth and moisture evaporation.

[0124] Two commercially available varieties of soybean seed, Asgrow AG46X6 and Pioneer P48A60X, were germinated by wrapping 6 seeds in moist paper towels and placing them in open plastic bags for 4 days. These cultivars were selected, because they are commonly grown agronomic varieties in Virginia. Three germinated seeds were placed an equal distance apart between the soil-perlite layer and sand-vermiculite layer of each pot, and forty pots contained Asgrow AG46X6 while the other forty pots contained Pioneer P48A60X. Plants were grown in a greenhouse with temperatures set at 28° C. during the day and 21° C. at night. An automatic irrigation system was also used to water the plants. Of note, cultivars P48A60X and AG46X6 fall into maturity groups 4.8 and 4.6 respectively, and planting occurred on July 13th rather than a more ideal time in the spring due to logistical challenges.

[0125] Three of the four bacteria isolated from soybean nodules, Bullseye, Pancake, and Starfish were selected to serve as inoculants. Each strain was grown overnight in 500 mL of modified lysogeny broth (LB) (Bertani 1951) (10 g NaCl and 5 g yeast extract per liter of dH2O). Each strain was then diluted to an optical density (OD) of 0.057+/−0.001. Serial dilutions were also performed immediately after diluting all the broths to an OD of 0.057. The density of each strain of bacteria expressed in colony forming units per mL (CFU/mL) following serial dilutions is shown in Table 1.

[0126] Sixteen days after planting, soybeans were thinned to one plant per pot and the remaining plant in each pot was inoculated with bacteria. Of the 80 total pots, 20 were inoculated with Bullseye, 20 were inoculated with Pancake, and 20 were inoculated with Starfish by pipetting 1 mL of OD 0.057 broth onto the base of each plant. The remaining 20 plants were left uninoculated to serve as controls. Soybeans were in the V2 growth stage at this time. FIG. 2 outlines the treatments and number of treatment repetitions for each soybean cultivar. Immediately following inoculation, pots were randomly distributed throughout the greenhouse in accordance with a completely randomized design. To randomly distribute pots throughout the greenhouse, irrigation tubes were assigned a number 1 to 80; likewise, pots were assigned a number 1 to 80. Once the pots and irrigation tubes were assigned numbers, the random number function in Microsoft Excel (version 16.33; Microsoft Corp., Redmond, WA, USA) was used to randomize the order of the pot of numbers 1-80. The list of irrigation tube numbers was left unrandomized. The first number in the randomized list of pot numbers was then paired with irrigation tube number 1, the second number in the randomized list of pot numbers was paired with the irrigation tube number 2 and so on until all 80 pots were randomly assigned a corresponding irrigation tube.

TABLE 1
Colony forming units per milliliter (CFU/mL) determined by serial
dilution for each strain of bacteria used during inoculation.

| Strain | CFU/mL |
|---|---|
| Bullseye | 4.3 × 10⁷ |
| Pancake | 4.4 × 10⁷ |
| Starfish | 5.4 × 10⁷ |

### Plant Harvest

[0127] Plants were harvested at two time points. For the sake of clarity, harvesting in this paper refers to the removal of plants from pots for the purpose of data collection. Five repetitions from each treatment group per cultivar were harvested when plants were in the R2/R3 growth stage (38 days after planting), and the remaining five repetitions from each treatment group per cultivar were harvested when plants were in the R6 growth stage (81 days after planting). The purpose of harvesting at two different time points was twofold. First, it allowed us to determine whether any parameters measured during early stages of flowering served as indicators of growth, yield, and NF during later stages of plant growth. Second, it helped us understand when the effects resulting from inoculants occurred.

[0128] A list of the various measurements of growth, yield, NF, and several ancillary variables taken is provided in Table 2. During the first harvest, the following parameters were measured or counted: stomatal conductance, plant height, flower number per plant, the number of trifoliates per plant, length of the second youngest trifoliate, shoot wet and dry mass, root length, root wet and dry mass, number of nodules per plant, nodule wet mass, total plant wet and dry mass, the ratio of shoot to root wet and dry mass, and chlorophyll content. Volumetric water content was measured during the first harvest as well, but this was not considered an indicator of growth, yield, or NF.

[0129] The distance between the tip of the center leaf on the trifoliate to the stem was used to determine trifoliate length. Plant height was determined by measuring the stem between the plant-soil interface and the highest node. Plants were removed from the pots and submerged in buckets of water, and the root ball was kneaded to remove soil from the roots. Root length was determined by measuring the distance between the highest lateral root extending out from the stem to the lowest point of the longest root and rounded to the nearest centimeter. Stomatal conductance was determined using a Leaf Porometer Model SC-1 (Decagon Devices Inc., Pullman, WA, USA). The conductance of the bottom side of the leaf was measured the day before harvest. Dry weights were taken after oven-drying samples for a minimum of 72 h at 75° C.-90° C. Samples were considered dry if they became brittle and broke easily when touched.

[0130] Plants that did not dry within 72 h were left in the ovens until dry (maximum of 6 days) Chlorophyll content was measured using a SPAD-502 chlorophyll meter (Minolta Co. limited, Japan) the day before harvest. Chlorophyll was assessed by taking the average of three SPAD readings from the center leaf of the second trifoliate from the top of each plant.

[0131] During the second harvest, the same parameter measurements collected during the first harvest were repeated. However, stomatal conductance, trifoliate length, trifoliate number, and volumetric water content were excluded during the second harvest. These four parameters were excluded from the second harvest, because harvesting was a time sensitive process and there was not time to collect data on all parameters. Consequently, data on the lowest priority parameters was not collected.

[0132] Several additional parameters were also measured during the second harvest. The additional parameters measured or counted during the second harvest include the following: pod wet and dry mass, number of pods per plant, number of seeds per plant, total above ground wet and dry mass, number of auxiliary branches per plant, and seed dry mass. Because NF and leaf nutrient concentration in soybeans peaks in the R5 growth stage then declines (McWilliams et al. 1999), chlorophyll content was measured during the R5 growth stage rather than during the second harvest when plants were in the R6 growth stage. Seed oil and protein content was also measured using a DA 7250 NIR Analyzer (Perten Instruments, Hägersten Sweden). Oil content was not considered an indicator of growth, yield, or NF but is nevertheless an important indicator of seed quality and therefore worthwhile to include.

TABLE 2
List of parameters serving as indicators of soybean
growth, yield, and nitrogen fixation, and additional
ancillary parameters measured during each harvest

| Indicator | | | |
|---|---|---|---|
| Category | Parameter | Harvest 1 | Harvest 2 |
| Nitrogen | SPAD | x | x* |
| Fixation | Nodule number per plant | x | x |
| | Nodule wet mass | x | x |
| | Seed protein content | | x |
| Plant | Plant height | x | x |
| Growth | Trifoliates per plant | x | |
| | Trifoliate length | x | |
| | Root length | x | x |
| | Root wet mass | x | x |
| | Shoot wet mass | x | x |
| | Total above ground wet mass | | x |
| | (pods + shoots) | | |
| | Total wet mass | x | x |
| | Root dry mass | x | x |
| | Shoot dry mass | x | x |
| | Pod dry mass | | x |
| | Total above ground dry mass | | x |
| | (pods + shoots) | | |
| | Total Dry mass | x | x |
| | Shoot/root dry mass ratio | x | x |
| | Auxiliary branches per plant | | x |
| | Shoot/root wet mass ratio | x | x |
| | Shoot/root dry mass ratio | x | x |
| | Stomatal conductance | x | |
| Yield | Flower number per plant | x | x |
| | Pod number per plant | | x |
| | Pod wet mass | | x |
| | Pod dry mass | | x |
| | Seed number per plant | | x |
| | Grain dry mass per plant | | x |
| Ancillary | Volumetric water content | x | |
| Parameters | Seed oil content | | x |

### Iron Solubilization

[0133] The ability of each strain of bacteria to produce siderophores was measured by determining whether or not each strain could solubilize Fe using a blue agar chrome azurol S (CAS) assay. Complexed ferric iron causes the CAS agar to appear blue. When blue CAS agar plates are inoculated with siderophore producing bacteria, the siderophores released by the bacteria chelate the Fe causing a color change: a translucent orange halo forms around the bacterial colony.

[0134] In the experiment, six CAS agar plates were each divided into four sections, and three of the four sections on each plate were spot inoculated with Bullseye, Pancake, and Starfish respectively. Sterile pipet tips were used to spot inoculate the three sections, and the fourth section remained uninoculated to serve as a control. After inoculation, plates were incubated at 28° C. for two days before assessing plates for color changes.

### Phosphorus Solubilization

[0135] The ability of each bacteria strain of interest to solubilize P was determined using National Botanical Research Institute Phosphate (NBRIP) agar media (Nautiyal 1999). The principal behind this method is similar to that described above for detecting Fe solubilization.

[0136] When NBRIP plates are inoculated with bacteria that produce phosphate-solubilizing compounds, such as organic acids, a transparent halo develops around the bacterial colony in the otherwise white, opaque media.

[0137] In the experiment, six NBRIP plates were divided into four sections each. Three of the sections on each plate were spot inoculated with Bullseye, Pancake, and Starfish using sterile pipet tips. The fourth section served as an uninoculated control. After inoculation, the plates were incubated at 28° C. and assessed for halo formation after two weeks of growth.

Recovery of Bacteria from Nodules

[0138] To determine whether or not bacteria used during inoculation could be recovered from soybean nodules, bacteria were extracted from nodules of a representative plant from each treatment group. Nodules obtained from harvested plants were surface sterilized by first submerging 2-5 nodules from a given plant in 0.9% NaCl solution and vortexing on high for 30 s to remove soil particles. The nodules were placed on a sieve containing wire mesh small enough to prevent the nodules from passing through. The nodules in the sieve and the tube in which the nodules were vortexed were then rinsed with deionized (DI) H2O and the nodules were returned to the tube. Nodules were vortexed in NaCl solution and rinsed a total of two times.

[0139] After the second rinse, nodules were placed in a clean 2 ml tube, and the tube was filled with 1.65% bleach (NaClO) solution. Nodules were vortexed on high for 30 s then the bleach solution was removed and discarded with a pipet. Nodules were removed and rolled onto sterile filter paper. Nodules were then placed back in the tube and rinsed a second time with the bleach solution. After the second rinse in bleach, nodules were rinsed twice with sterile DI H2O. Tubes containing nodules were filled with sterile DI H2O, vortexed on high for 30 s and the DI H2O was discarded. Nodules were dried by rolling them on sterile filter paper. Nodules were then transferred to a plate containing yeast mannitol agar (YMA) and rolled on the YMA plate for several seconds. The YMA plates were checked after 5 days for growth. If no growth occurred, the outside of nodules was considered sterile.

[0140] After sterilizing the outside of nodules, two to three of the sterilized nodules from a given plant were added to 15 mL tubes containing 2 mL of 0.9% NaCl solution. A sterile rod was used to crush the nodules and mix the tubes to suspend nodule bacteria in solution. Plates containing KBC agar were prepared, and 100 μL of NaCl solution containing nodule bacteria was pipetted onto the KBC plates. Colonies that grew on the KBC plates were selected and streaked onto LB agar plates to compare their colony morphology to that of the bacteria used for inoculation.

[0141] Transferring the bacteria onto LB agar was necessary, because the colony morphology of inoculant strains differs on different media. If colony morphologies of bacteria extracted from the nodules matched that of inoculant strains, then the 16 s rRNA gene for representative colonies was sequenced to ensure they matched that of the inoculant strains.

### Genome Sequencing and Analysis

[0142] For each of the strains used in the study, genomic DNA was isolated using a Puregene DNA Isolation Kit (Cat. No. D-5000A, Minneapolis, MN, USA) following the manufacturer's instructions, and genomic DNA was sent for sequencing to Novogene Corporation Inc. (Sacramento, CA, USA). After sequencing, Illumina reads were trimmed using Trimmomatic (Bolger et al. 2014). Reads were then assembled using ABySS (Jackman et al. 2017), and assemblies were corrected using REAPR (Hunt et al. 2013). Scaffolding was performed using SSpace (Boetzer et al. 2011), and assembly gaps were filled with GapFiller (Boetzer and Pirovano 2012). Assemblies were then annotated using the Prokka pipeline (Seemann 2014). Pseudomonas SBW25 (Genebank accession: NC_012660.1) was used as reference strain, and LINbase (Tian et al. 2019) and an ANI calculator (Rodriguez-R and Konstantinidis 2016) were used to make genome comparisons.

### Statistical Analysis

[0143] Multivariate statistical analysis was conducted using PC-ORD version 6 software (MJM Software, Gleneden Beach, OR, USA; McCune and Medfford 2011), and univariate analyses were performed using JMP Pro 15.0.0 software (SAS Institute Inc., Cary, NC, USA). Not all response variables contained normally distributed data or approximately equal variances (Table 24 and Table 25), so two non-parametric multivariate tests were used to analyze the data: multi-response permutation procedures (MRPP; Mielke and Berry 2007) and permutational multivariate analysis of variance (PERMANOVA; Anderson 2001). The data was also analyzed using canonical correspondence analysis (CCA; Braak 1986) and Bray-Curtis ordination (Bray and Curtis 1957) using Euclidean distance. Unlike multivariate analysis of variance (MANOVA), which is used with parametric data, MRPP and PERMANOVA do not allow one to analyze interaction effects. Consequently, the data were broken into pieces and analyzed separately. Ordinates for the two-dimensional solutions were calculated using Polar ordination (similar to PCoA) and Euclidian distance.

[0144] The data was divided in two ways. Data were separated by harvest and by cultivar. As a result, four sets of data were created: 1st harvest Asgrow, 1st harvest Pioneer, 2nd harvest Asgrow, and 2nd harvest Pioneer. Each of the four sets of data were analyzed using MRPP and PERMANOVA, and both tests were performed twice, once using unrelativized data and once using relativized data. During the first analysis, raw data from all response variables in each data set were tested, and this raw data is referred to throughout this paper as unrelativized data.

[0145] During the second analysis, certain ancillary response variables or those highly correlated with other variables were excluded from each set and the remaining data was relativized. This data is referred to throughout this paper as relativized data.

[0146] Relativization standardizes the data to provide a pattern of response whereby measurements associated with each variable are converted to a percent, and the sum total of all the converted variables is equal to 100. To relativize data, each response variable from a given plant is divided by the sum total of all the response variables measured for that plant and multiplied by 100. Each measurement associated with a given response variable from a given plant therefore represent a percent of all the measurements for all the response variables from that plant following the relativization process. Relativization highlights the proportional effect treatments have on different response variables. For example, suppose bacteria caused all response variables to increase, and all the variables increased the same amount relative to all the others. In this case, analysis of relativized data would show bacteria had proportionately equal effects on all variables, and the percentage associated with any given variable would not change in response to the bacteria even though the raw (unrelativized) values all increase. However, if bacteria caused all variables to increase, but the increase in one variable was greater relative to the other variables, then the percentage associated with that variable would increase.

[0147] Relativization therefore highlights proportional changes in data in response to treatments while deemphasizing other changes in the raw (unrelativized) data. While other changes in raw data, such as response size, are important, they are generally represented using univariate techniques.

[0148] CCA was only used to analyze unrelativized data using constrained multiple regression, while Bray-Curtis ordination was used to analyze both relativized and unrelativized data.

[0149] The relativized data did not include certain response variables, because they were either highly correlated with other response variables or they were not central to the main objectives Specifically, root, shoot, and pod wet mass were highly correlated with root, shoot, and pod dry mass respectively. Wet mass is more subject to error than dry mass, because differences in the amount of residual water leftover from cleaning the roots and differences in time the samples spent out of the soil prior to measurement, which leads to different amounts of water loss, can cause variations in measurements. This was expected prior to harvest. Additionally, plants were well watered, so differences in wet mass resulting from drought stress were not expected. Once dry mass data was collected, it was used rather than wet weights.

[0150] No dry mass of nodules was taken. Nodules were not dried in order to preserve bacteria living within the nodules by storing them in a −20° C. freezer. Consequently, nodule wet mass was included in the relativized data. Biomass measurements derived from the sum of two or more response variables were also excluded, because these were already accounted for in the model (i.e. total wet and dry mass and total aboveground wet and dry mass). Seed oil content and soil water content were not related to growth, yield, or NF, so these were also excluded from the relativized data. If data were not correlated in the unrelativized data, as predicted, it made sense to remove these data as well. Finally, outliers more than three standard deviations from the mean were excluded as well for the MRPP analyses. The PERMANOVA model does not allow exclusion of outliers, however.

[0151] Statistical differences observed following MRPP and PERMANOVA analyses were further explored by performing two-way analysis of variance (ANOVA) tests on response variables included in the multivariate models. Only select variables were analyzed using ANOVA: the highest three vectors with Pearson and Kendall correlation R values of >0.60 or <−0.60 associated with a given axis on each Bray-Curtis plot, or the highest three vectors with inter-set correlation values of >0.60 or <−0.60 associated with a given axis on each CCA plot. If a plot did not have three variables with correlation values>0.60 or <−0.60 on a given Bray-Curtis or CCA plot, only those that did were analyzed further.

[0152] Two-way ANOVAs were not appropriate for some response variables, because data corresponding to some response variables were not normally distributed or did not have equal variances (Appendix A: Table 24 Table 25). In such cases, Kruskal-Wallis tests were used to analyze the effect of bacterial treatments for that variable. If results from univariate tests showed significant differences existed, post-hoc Tukey's honestly significant difference analyses were used to determine differences in means of the various treatment combinations. Two-sample t-tests were used to compare means between cultivars, and a significance level (a) of 0.05 was used for all tests.

### Results

### First Harvest: Multivariate Analysis of Growth, Yield, and Nitrogen Fixation

[0153] The 1st Harvest, Asgrow, unrelativized data set was the first data set analyzed using MRPP. The main effect from this analysis was significant (p<0.05), which shows differences exist among treatments (Table 3). Pairwise comparisons revealed controls differed from soybeans treated with Pancake and Starfish, but soybeans treated with bacterial inoculants did not differ among each other (Table 4). FIG. 3A shows a Bray-Curtis ordination plot comparing the three bacterial inoculants and the control, and unique clustering patterns of data points representing different treatments indicate differences among the treatments. Furthermore, the variables exerting high levels of influence (R-value or R2>0.6 or <−0.6 on at least one axis) on the model include stomatal conductance, root wet mass, and number of nodules as seen in the table of Pearson and Kendall correlations that corresponds with this data set (Table 7).

[0154] The CCA plot also shows cluster patterns among the different treatment groups, but the CCA plot for unrelativized Asgrow data shows more overlap among the treatments than the Bray-Curtis plot (FIG. 4A). The p-values associated with CCA show no significant differences for MRPP, but they do show differences for PERMANOVA (Table 5 and Table 6). PERMANOVA pairwise comparisons show Pancake and Bullseye differ from the control (Table 6). Variables with high levels of influence (inter-set correlations>0.6 or <−0.6 on at least one axis) on the CCA plot include stomatal conductance and nodules per plant (Table 8).

[0155] Results from the Asgrow relativized MRPP analysis of Bray-Curtis ordinates show similar results to that of the unrelativized MRPP analysis: differences (p<0.05) exist among treatments (Table 3). The pairwise comparison results show the control is different from Pancake, but no other comparisons are significant (Table 4). A Bray-Curtis plot displaying the output from the relativized MRPP data is shown in FIG. 3B, and variables resulting in high levels of influence (R-value or R2>0.6 or <−0.6 on at least one axis) over the model include height, trifoliate length, nodule number, nodule mass, and shoot-to-root mass ratio (Table 9).

[0156] Results from the Bray-Curtis ordination for Asgrow unrelativized data analyzed using PERMANOVA are generally consistent with those of both MRPP analyses: it shows significant differences exist among treatments (p<0.05; Table 3). Nevertheless, the PERMANOVA also showed greater differences among treatments. It showed lower p-values for the main effect than that of the MRPP analyses, and all pairwise comparisons between bacterial inoculants and controls resulted in significant differences (Table 4). Unlike the results of the MRPP analysis, Starfish also differed from the other two bacteria. Not only were all pairwise comparisons significantly different, all pairwise comparisons resulted in substantially lower p-values than the MRPP pairwise comparison p-values. Results of Asgrow PERMANOVA of relativized data were similar to those of the unrelativized data. Differences existed among treatments (p<0.05; Table 3), and all pairwise comparisons resulted in significant differences (Table 4).

[0157] The unrelativized MRPP main effect associated with Bray-Curtis ordination for Pioneer soybeans also showed differences exist among treatments (p<0.05; Table 3). Like the pairwise comparison results from Asgrow, pairwise comparisons for Pioneer showed controls differed from soybeans treated with Pancake and Starfish (Table 4). The Bray-Curtis plot (FIG. 3C) and the CCA plot (FIG. 4B) show the data points representing control treatments occupy a different region of space than data points representing soybeans inoculated with Pancake and Starfish.

[0158] This indicates differences exist between the controls and inoculated plants. Because the data points that represent plants inoculated by each of the three bacteria occupy a shared space, there are no differences among inoculation treatments. Additionally, variables with the greatest influence (R-value or R2>0.6 or <−0.6 on at least one axis) on the model used to generate the Bray-Curtis plot include root wet mass, number of nodules, and nodule mass (Table 10).

[0159] The Pioneer CCA data resulted in significant differences for both MRPP and PERMANOVA (Table 5). Pairwise comparisons showed the control was different from both Pancake and Starfish for both MRPP and PERMANOVA (Table 6). Variables with the greatest influence (inter-set correlations>0.6 or <−0.6 on at least one axis) over the model used to generate the CCA plot include SPAD, stomatal conductance, and nodules per plant (Table 11) The relativized MRPP main effect for Pioneer Bray-Curtis ordination also resulted in a significant p-value (p<0.05; Table 3). FIG. 3D shows data from the relativized MRPP analysis is indistinguishable from the plot representing data from the unrelativized MRPP analysis (FIG. 3C). Pairwise comparisons following the relativized MRPP analysis show the control only differed from Pancake, but Pancake also differed from Starfish (Table 4). Stomatal conductance, root length, and nodule number had the strongest influence (R-value or R2>0.6 or <−0.6 on at least one axis) over the model used to generate the Bray-Curtis plot (Table 12).

[0160] Results from the PERMANOVA analyses of both relativized and unrelativized Pioneer data associated with Bray-Curtis ordination show significant differences among treatments (p<0.05; Table 3), and pairwise comparisons show all bacterial treatments differed from the control (Table 4). Additionally, the main effect of the PERMANOVA analyses of both relativized and unrelativized data for Pioneer soybeans were generally consistent with those of the MRPP analyses, but the PERMANOVA analyses resulted in substantially lower p-values and more differences among the pairwise comparisons.

TABLE 3
First harvest MRPP and PERMANOVA p-values
associated with Bray-Curtis ordination

| | Unrelativized | Relativized | Unrelativized | Relativized |
|---|---|---|---|---|
| Cultivar | MRPP | MRPP | PERMANOVA | PERMANOVA |
| Asgrow | 0.033* | 0.035* | <0.001* | <0.001* |
| Pioneer | 0.022* | 0.027* | 0.002* | <0.001* |

*Indicates p < 0.05

TABLE 4
First harvest Bray-Curtis MRPP and PERMANOVA pairwise comparison
p-values among all four treatment groups for each cultivar

| | Pairwise Comparison P-Values | | | | | | | |
|---|---|---|---|---|---|---|---|---|
| | Unrelativized | | Relativized | | Unrelativized | | Relativized | |
| Treatment | MRPP | | MRPP | | PERMANOVA | | PERMANOVA | |
| Comparison | Asgrow | Pioneer | Asgrow | Pioneer | Asgrow | Pioneer | Asgrow | Pioneer |
| Control vs. | 0.133 | 0.084 | 0.312 | 0.307 | 0.008* | 0.015* | 0.008* | 0.005* |
| Bullseye | | | | | | | | |
| Control vs. | 0.008* | 0.005* | 0.034* | 0.034* | 0.007* | 0.009* | 0.008* | 0.007* |
| Pancake | | | | | | | | |
| Control vs. | 0.016* | 0.015* | 0.454 | 0.543 | 0.010* | 0.007* | 0.008* | 0.006* |
| Starfish | | | | | | | | |
| Bullseye vs. | 0.514 | 0.113 | 0.129 | 0.133 | 0.140 | 0.395 | 0.009* | 0.010* |
| Pancake | | | | | | | | |
| Bullseye vs. | 0.236 | 0.325 | 0.383 | 0.410 | 0.017* | 0.450 | 0.008* | 0.008* |
| Starfish | | | | | | | | |
| Pancake vs. | 0.615 | 0.359 | 0.023* | 0.029* | 0.016* | 0.082 | 0.008* | 0.010* |
| Starfish | | | | | | | | |

*Indicates p < 0.05

TABLE 5
First harvest MRPP and PERMANOVA p-values associated
with canonical correspondence analysis

| Cultivar | MRPP | PERMANOVA |
|---|---|---|
| Asgrow | nd | 0.026* |
| Pioneer | 0.045* | 0.020* |

*Indicates p < 0.05

TABLE 6
First harvest MRPP and PERMANOVA pairwise comparison p-
values associated with canonical correspondence analysis

| | | |
|---|---|---|
| Treatment | MRPP | PERMANOVA |

| Comparison | Asgrow | Pioneer | Asgrow | Pioneer |
|---|---|---|---|---|
| Control vs. | nd | 0.216 | 0.063* | 0.165 |
| Bullseye | | | | |
| Control vs. | nd | 0.037* | 0.035* | 0.028* |
| Pancake | | | | |
| Control vs. | nd | 0.049* | 0.095 | 0.003* |
| Starfish | | | | |
| Bullseye vs. | no | 0.086 | 0.480 | 0.056 |
| Pancake | | | | |
| Bullseye vs. | nd | 0.356 | 0.560 | 0.095 |
| Starfish | | | | |
| Pancake vs. | nd | 0.247 | 0.693 | 0.113 |
| Starfish | | | | |

*Indicates p < 0.05

TABLE 7
Pearson and Kendall correlations with ordination axes derived
from unrelativized data for 1st Harvest, Asgrow soybeans

| | | |
|---|---|---|
| Response | Axis 1 | Axis 2 |

| Variable | R | R² | R | R² |
|---|---|---|---|---|
| SPAD | 0.411 | 0.169 | 0.393 | 0.154 |
| Stomatal | 0.611* | 0.374 | −0.667* | 0.444 |
| Conductance | | | | |
| Height | −0.317 | 0.101 | 0.171 | 0.029 |
| Flowers Per Plant | −0.369 | 0.136 | 0.402 | 0.161 |
| Trifoliates Per | 0.186 | 0.034 | 0.301 | 0.091 |
| Plant | | | | |
| Trifoliate Length | 0.297 | 0.088 | 0.045 | 0.002 |
| Volumetric H₂O | −0.229 | 0.052 | 0.238 | 0.057 |
| Content | | | | |
| Root Length | −0.530 | 0.280 | 0.551 | 0.304 |
| Root Wet Mass | −0.646* | 0.418 | 0.183 | 0.034 |
| Shoot Wet Mass | −0.010 | 0.000 | 0.319 | 0.102 |
| Total Wet Mass | −0.354 | 0.125 | 0.326 | 0.106 |
| Nodules Per Plant | −0.898* | 0.806* | −0.022 | 0.001 |
| Nodules Mass | −0.382 | 0.146 | 0.409 | 0.167 |
| Shoot Dry Mass | −0.048 | 0.002 | 0.308 | 0.095 |
| Root Dry Mass | −0.506 | 0.256 | 0.309 | 0.095 |
| Total Dry Mass | −0.149 | 0.022 | 0.335 | 0.112 |
| Shoot/Root Dry | 0.427 | 0.182 | 0.071 | 0.005 |
| Mass Ratio | | | | |

*Indicates R² or R-value >0.600 or <−0.600

TABLE 8
First harvest Asgrow inter-set correlations associated with
canonical correspondence analysis of unrelativized data

Correlations

| Response Variable | Axis 1 | Axis 2 |
|---|---|---|
| SPAD | −0.473 | −0.262 |
| Stomatal Conductance | −0.442 | 0.745* |
| Height | 0.221 | −0.021 |
| Flowers Per Plant | 0.387 | −0.271 |
| Trifoliates Per Plant | −0.300 | −0.016 |
| Trifoliate Length | −0.284 | 0.205 |
| Root Length | 0.548 | 0.025 |
| Nodules Per Plant | 0.864* | 0.427 |
| Nodule Mass | 0.162 | 0.161 |
| Shoot Dry Mass | 0.043 | −0.066 |
| Root Dry Mass | 0.584 | 0.006 |
| Total Dry Mass | 0.162 | −0.057 |

*Indicates R² or R-value >0.600 or <−0.600

TABLE 9
Pearson and Kendall correlations with ordination axes derived
from relativized data for 1st Harvest, Asgrow soybeans

| Response | Axis 1 | | Axis 2 | |
|---|---|---|---|---|
| Variable | R | R² | R | R² |
| SPAD | −0.527 | 0.278 | 0.453 | 0.205 |
| Stomatal Conductance | −0.316 | 0.100 | 0.197 | 0.039 |
| Height | −0.663* | 0.439 | 0.392 | 0.153 |
| Flowers Per Plant | −0.194 | 0.037 | 0.148 | 0.022 |
| Trifoliates Per Plant | −0.282 | 0.080 | 0.576 | 0.332 |
| Trifoliate Length | −0.639* | 0.409 | 0.556 | 0.309 |
| Root Length | −0.278 | 0.077 | −0.319 | 0.102 |
| Nodules Per Plant | −0.008 | 0.000 | −0.853* | 0.727* |
| Nodule Mass | 0.992* | 0.984* | −0.484 | 0.234 |
| Shoot Dry Mass | −0.201 | 0.040 | 0.588 | 0.345 |
| Root Dry Mass | −0.124 | 0.015 | −0.455 | 0.207 |
| Total Dry Mass | −0.235 | 0.055 | 0.425 | 0.180 |
| Shoot/Root Mass Ratio | −0.433 | 0.188 | 0.881* | 0.776* |

*Indicates R² or R-value >0.600 or <−0.600

TABLE 10
Pearson and Kendall correlations with ordination axes derived
from unrelativized data for 1st Harvest, Pioneer soybeans

| Response | Axis 1 | | Axis 2 | |
|---|---|---|---|---|
| Variable | R | R² | R | R² |
| SPAD | −0.477 | 0.228 | −0.095 | 0.009 |
| Stomatal Conductance | −0.544 | 0.296 | −0.354 | 0.125 |
| Height | −0.314 | 0.099 | −0.230 | 0.053 |
| Flowers Per Plant | −0.360 | 0.130 | −0.024 | 0.001 |
| Trifoliates Per Plant | −0.260 | 0.068 | 0.255 | 0.065 |
| Trifoliate Length | −0.513 | 0.263 | −0.027 | 0.001 |
| Volumetric H₂O Content | −0.093 | 0.009 | −0.532 | 0.283 |
| Root Length | 0.341 | 0.117 | 0.504 | 0.254 |
| Root Wet Mass | −0.617* | 0.380 | −0.247 | 0.061 |
| Shoot Wet Mass | −0.451 | −0.204 | 0.068 | 0.005 |
| Total Wet Mass | −0.586 | 0.343 | −0.056 | 0.003 |
| Nodules Per Plant | −0.842* | 0.708* | 0.170 | 0.029 |
| Nodules Mass | −0.711* | 0.505 | −0.024 | 0.001 |
| Shoot Dry Mass | −0.411 | 0.169 | 0.072 | 0.005 |
| Root Dry Mass | −0.342 | 0.117 | −0.014 | 0.000 |
| Total Dry Mass | −0.408 | 0.166 | 0.055 | 0.003 |
| Shoot/Root Dry Mass Ratio | −0.238 | 0.057 | 0.110 | 0.012 |

*Indicates R² or R-value >0.600 or <−0.600

TABLE 11
First harvest Pioneer inter-set correlations associated with
canonical correspondence analysis of unrelativized data

Correlations

| Response Variable | Axis 1 | Axis 2 |
|---|---|---|
| SPAD | 0.600 | 0.241 |
| Stomatal Conductance | −0.201 | 0.691* |
| Height | 0.285 | 0.275 |
| Flowers Per Plant | 0.365 | 0.223 |
| Trifoliates Per Plant | 0.354 | 0.032 |
| Trifoliate Length | 0.402 | 0.365 |
| Root Length | −0.068 | −0.478 |
| Nodules Per Plant | 0.853* | 0.351 |
| Nodule Mass | 0.565 | 0.512 |
| Shoot Dry Mass | 0.456 | 0.162 |
| Root Dry Mass | 0.215 | 0.299 |
| Total Dry Mass | 0.452 | 0.222 |

*Indicates R² or R-value >0.600 or <−0.600

TABLE 12
Pearson and Kendall correlations with ordination axes derived
from relativized data for 1st Harvest, Pioneer soybeans

| | | |
|---|---|---|
| Response | Axis 1 | Axis 2 |

| Variable | R | R² | R | R² |
|---|---|---|---|---|
| SPAD | 0.485 | 0.236 | 0.133 | 0.018 |
| Stomatal | −0.208 | 0.043 | −0.857* | 0.734* |
| Conductance | | | | |
| Height | 0.437 | 0.191 | 0.005 | 0.000 |
| Flowers Per Plant | 0.055 | 0.003 | 0.035 | 0.001 |
| Trifoliates Per | 0.467 | 0.218 | 0.385 | 0.148 |
| Plant | | | | |
| Trifoliate Length | 0.207 | 0.043 | 0.117 | 0.014 |
| Root Length | 0.769* | 0.591 | 0.664* | 0.441 |
| Nodules Per Plant | −0.888* | 0.789* | 0.319 | 0.102 |
| Nodule Mass | −0.593 | 0.352 | −0.009 | 0.000 |
| Shoot Dry Mass | 0.040 | 0.002 | 0.167 | 0.028 |
| Root Dry Mass | 0.218 | 0.048 | 0.12 | 0.014 |
| Total Dry Mass | 0.079 | 0.006 | 0.164 | 0.027 |
| Shoot/Root Mass | 0.275 | 0.076 | 0.159 | 0.025 |
| Ratio | | | | |

*Indicates R² or R-value >0.600 or <−0.600

### First Harvest Follow-Up Analyses

[0161] After MRPP and PERMANOVA analyses of data associated with Bray-Curtis ordination and CCA led us to conclude there were differences between bacterial treatments, these differences were investigated further by performing two-way ANOVAs on parametric data and Kruskal-Wallis tests on non-parametric data for each response variable. Limitations of the non-parametric multivariate tests prevented testing of interaction effects between cultivars and bacteria, but the two-way ANOVAs allowed us to test for such interaction effects for each response variable. The following response variables significantly differed (p<0.05) between cultivars: SPAD, stomatal conductance, and nodule number. In all three cases, Asgrow soybeans displayed higher values than Pioneer soybeans (FIG. 5).

[0162] No interaction effects were observed, and only one response variable, root length, differed (p<0.05) among bacterial treatments (FIG. 6). Tukey's HSD revealed Pancake caused plants to produce longer roots than the control group, and roots of plants inoculated with Pancake were 33% longer on average than roots of controls. However, there was no significant difference among plants treated with the three bacterial inoculants, and there was no significant difference between uninoculated plants and those inoculated with Bullseye or Starfish.

### Second Harvest: Multivariate Analysis of Growth, Yield, and Nitrogen Fixation

[0163] Neither the relativized nor the unrelativized MRPP analyses associated with Bray-Curtis ordination resulted in any significant differences for either cultivar following the second harvest. The PERMANOVA analyses, on the other hand, resulted in significant differences for both soybean cultivars (Table 13). Additionally, pairwise comparisons for both Asgrow and Pioneer show all bacteria were significantly different from the control and from each other based on PERMANOVA results (Table 14). Bray-Curtis plots for unrelativized and relativized data for each cultivar are shown in FIG. 7A-D and corresponding Pearson and Kendall correlations are shown in Table 17, Table 18, Table 19, and Table 20 respectively. None of the Bray-Curtis ordination plots showed separation among the different treatment groups.

[0164] The CCA plot for Asgrow showed separation between points representing controls and those representing the three inoculants, and there appears to be separation between Starfish and Pancake (FIG. 8A). Separation is not apparent in the CCA plot for Pioneer (FIG. 8B). Nevertheless, both the MRPP and PERMANOVA tests show differences exist among both cultivars (Table 15). Pairwise comparisons show controls differed from Pancake and Starfish for both cultivars and both statistical tests (Table 16). Asgrow response variables showing a strong influence over the model (inter-set correlations of >0.6 or <−0.6 for at least one axis) include SPAD, nodules per plant, seeds per plant, seed dry mass, auxiliary branches, and pod dry mass (Table 21). Highly influential variables for Pioneer data include root length and nodules per plant (Table 22).

TABLE 13
Second harvest MRPP and PERMANOVA p-values associated with
Bray-Curtis ordination

| | Unrelativized | Relativized | Unrelativized | Relativized |
|---|---|---|---|---|
| Cultivar | MRPP | MRPP | PERMANOVA | PERMANOVA |
| Asgrow | 0.125 | 0.066 | <0.001* | <0.001* |
| Pioneer | 0.490 | 0.835 | nd^{†} | <0.001* |

*Indicates p < 0.05
^{†}No difference

TABLE 14
Second harvest PERMANOVA pairwise comparison p-values for both
Asgrow and Pioneer Soybeans associated with Bray-Curtis Ordination

| Treatment | Relativized | | Unrelativized | |
|---|---|---|---|---|
| Comparison | Asgrow | Pioneer | Asgrow | Pioneer |
| Control vs. Bullseye | 0.007* | 0.040* | 0.009* | ndt |
| Control vs. Pancake | 0.008* | 0.008* | 0.006* | nd |
| Control vs. Starfish | 0.009* | 0.008* | 0.007* | nd |
| Bullseye vs. Pancake | 0.016* | 0.124 | 0.014* | nd |
| Bullseye vs. Starfish | 0.007* | 0.095 | 0.009* | nd |
| Pancake vs. Starfish | 0.010* | 0.334 | 0.011* | nd |

*Indicates p < 0.05
^{†}No difference

TABLE 15
Second harvest MRPP and PERMANOVA p-values
associated with canonical correspondence analysis

| Cultivar | MRPP | PERMANOVA |
|---|---|---|
| Asgrow | 0.035* | 0.002* |
| Pioneer | 0.010* | <0.001* |

*Indicates p < 0.05

TABLE 16
Second harvest MRPP and PERMANOVA pairwise comparison
p-values associated with canonical correspondence analysis

| | MRPP | | PERMANOVA | |
|---|---|---|---|---|
| Treatment Comparison | Asgrow | Pioneer | Asgrow | Pioneer |
| Control vs. Bullseye | 0.152 | 0.116 | 0.155 | 0.103 |
| Control vs. Pancake | 0.015* | 0.024* | 0.009* | 0.014* |
| Control vs. Starfish | 0.017* | 0.017* | 0.002* | 0.011* |
| Bullseye vs. Pancake | 0.346 | 0.346 | 0.256 | 0.493 |
| Bullseye vs. Starfish | 0.026* | 0.035* | 0.011 | 0.016* |
| Pancake vs. Starfish | 0.237 | 0.029* | 0.047 | 0.015* |

*Indicates p < 0.05

TABLE 17
Pearson and Kendall correlations with ordination axes derived
from unrelativized data for 2nd Harvest, Asgrow soybeans

| Response | Axis 1 | | Axis 2 | |
|---|---|---|---|---|
| Variable | R | R² | R | R² |
| SPAD | 0.084 | 0.007 | 0.533 | 0.284 |
| Height | −0.375 | 0.140 | −0.19 | 0.036 |
| Pod Number | −0.121 | 0.015 | 0.052 | 0.003 |
| Root Length | 0.302 | 0.091 | −0.921* | 0.848* |
| Nodule Number | −0.947* | 0.897* | −0.186 | 0.035 |
| Nodule Mass | −0.463 | 0.214 | −0.262 | 0.069 |
| Shoot Dry Mass | −0.145 | 0.021 | −0.259 | 0.067 |
| Root Dry Mass | −0.389 | 0.151 | −0.363 | 0.132 |
| Seeds Per Plant | 0.032 | 0.001 | 0.172 | 0.030 |
| Seed Dry Mass | −0.361 | 0.130 | 0.033 | 0.001 |
| Auxiliary Branches Per Plant | 0.022 | 0.000 | 0.043 | 0.002 |
| Pod Dry Mass | −0.231 | 0.053 | 0.162 | 0.026 |
| Protein | −0.092 | 0.008 | 0.338 | 0.114 |

*Indicates R² or R-value > 0.600 or < −0.600

TABLE 18
Pearson and Kendall correlations with ordination axes derived
from relativized data for 2nd Harvest, Asgrow soybeans

| Response | Axis 1 | | Axis 2 | |
|---|---|---|---|---|
| Variable | R | R² | R | R² |
| SPAD | −0.802* | 0.643* | −0.421 | 0.177 |
| Height | −0.606* | 0.367 | −0.118 | 0.014 |
| Pods Per Plant | −0.657* | 0.431 | −0.357 | 0.127 |
| Root Length | −0.802* | 0.643* | 0.473 | 0.224 |
| Nodules Per Plant | 0.992* | 0.985* | 0.205 | 0.042 |
| Nodule Mass | 0.0530 | 0.003 | 0.094 | 0.009 |
| Shoot Dry Mass | −0.487 | 0.237 | −0.088 | 0.008 |
| Root Dry Mass | 0.106 | 0.011 | 0.260 | 0.068 |
| Total Dry Mass | −0.731* | 0.534 | −0.320 | 0.102 |
| Shoot/Root Dry Mass | −0.645* | 0.416 | −0.406 | 0.165 |
| Seeds Per Plant | −0.837* | 0.700 | −0.447 | 0.200 |
| Seed Dry Mass | −0.759* | 0.577 | −0.446 | 0.199 |
| Auxiliary Branches Per Plant | −0.412 | 0.170 | −0.146 | 0.021 |
| Pod Dry Mass | −0.829* | 0.687* | −0.515 | 0.265 |
| Above Ground Dry Mass | −0.809* | 0.655* | −0.415 | 0.172 |
| Oil | −0.903* | 0.815* | −0.393 | 0.154 |
| Protein | −0.746* | 0.557 | −0.456 | 0.208 |

*Indicates R² or R-value > 0.600 or < −0.600

TABLE 19
Pearson and Kendall correlations with ordination axes derived
from unrelativized data for 2nd Harvest, Pioneer soybeans

| | Axis 1 | | Axis 2 | |
|---|---|---|---|---|
| Response Variable | R | R² | R | R² |
| SPAD | −0.066 | 0.004 | 0.499 | 0.249 |
| Height | 0.390 | 0.152 | −0.156 | 0.024 |
| Pods Per Plant | 0.140 | 0.019 | 0.145 | 0.021 |
| Root Length | −0.284 | 0.081 | −0.945* | 0.893* |
| Root Wet Mass | −0.286 | 0.082 | −0.471 | 0.222 |
| Shoot Wet Mass | −0.018 | 0.000 | −0.233 | 0.054 |
| Nodule Number | 0.955* | 0.912* | −0.021 | 0.000 |
| Nodule Mass | 0.486 | 0.236 | −0.122 | 0.015 |
| Total Wet Mass | −0.117 | 0.014 | −0.263 | 0.069 |
| Shoot Dry Mass | 0.232 | 0.054 | −0.113 | 0.013 |
| Root Dry Mass | 0.479 | 0.229 | −0.189 | 0.036 |
| Total Dry Mass | 0.362 | 0.131 | 0.026 | 0.001 |
| Shoot/Root Mass Ratio | −0.416 | 0.173 | 0.235 | 0.055 |
| Pod Wet Mass | 0.049 | 0.002 | 0.271 | 0.073 |
| Seeds Per Plant | 0.042 | 0.002 | 0.252 | 0.063 |
| Seed Dry Mass | 0.406 | 0.165 | 0.174 | 0.030 |
| Auxiliary Branches Per Plant | −0.079 | 0.006 | 0.109 | 0.012 |
| Aboveground Wet Mass | 0.012 | 0.000 | −0.019 | 0.000 |
| Pod Dry Mass | 0.279 | 0.078 | 0.285 | 0.081 |
| Aboveground Dry Mass | 0.282 | 0.080 | 0.115 | 0.013 |
| Oil | −0.418 | 0.174 | 0.074 | 0.006 |
| Protein | −0.002 | 0.000 | 0.262 | 0.069 |

*Indicates R² or R-value > 0.600 or < - 0.600

TABLE 20
Pearson and Kendall correlations with ordination axes derived
from relativized data for 2nd Harvest, Pioneer soybeans

| Response | Axis 1 | | Axis 2 | |
|---|---|---|---|---|
| Variable | R | R² | R | R² |
| SPAD | 0.300 | 0.090 | 0.881* | 0.777* |
| Height | 0.480 | 0.231 | 0.767* | 0.588 |
| Pods Per Plant | 0.290 | 0.084 | 0.582 | 0.338 |
| Root Length | 0.766* | 0.586 | −0.477 | 0.227 |
| Nodules Per Plant | −0.855* | 0.730* | −0.671* | 0.451 |
| Nodule Mass | −0.270 | 0.073 | 0.360 | 0.129 |
| Shoot Dry Mass | 0.400 | 0.160 | 0.425 | 0.180 |
| Root Dry Mass | 0.227 | 0.051 | 0.060 | 0.004 |
| Total Dry Mass | 0.332 | 0.110 | 0.670 | 0.449 |
| Shoot/Root Mass | 0.230 | 0.053 | 0.746* | 0.556 |
| Ratio | | | | |
| Seeds Per Plant | 0.056 | 0.003 | 0.855* | 0.732 |
| Seed Dry Mass | 0.250 | 0.063 | 0.816* | 0.666* |
| Auxiliary | 0.056 | 0.003 | 0.433 | 0.188 |
| Branches Per | | | | |
| Plant | | | | |
| Pod Dry Mass | 0.238 | 0.057 | 0.807* | 0.652* |
| Above Ground | 0.331 | 0.109 | 0.734* | 0.539 |
| Dry Mass | | | | |
| Oil | 0.271 | 0.073 | 0.833* | 0.694* |
| Protein | 0.296 | 0.087 | 0.848* | 0.719* |

*Indicates R² or R-value > 0.600 or < −0.600

TABLE 21
Second harvest Asgrow inter-set correlations associated with
canonical correspondence analysis of unrelativized data

| | Correlations | |
|---|---|---|
| Response Variable | Axis 1 | Axis 2 |
| SPAD | 0.298 | 0.638* |
| Height | 0.452 | 0.313 |
| Pods Per Plant | 0.280 | 0.522 |
| Root Length | 0.418 | 0.412 |
| Nodules Per Plant | −0.444 | −0.649* |
| Nodule Mass | 0.041 | 0.054 |
| Shoot Dry Mass | 0.049 | 0.578 |
| Root Dry Mass | 0.035 | 0.122 |
| Seeds Per Plant | 0.286 | 0.627* |
| Seed Dry Mass | 0.297 | 0.621* |
| Auxiliary Branches | −0.191 | 0.613* |
| Pod Dry Mass | 0.332 | 0.626* |
| Protein | 0.365 | 0.538 |

*Indicates R² or R-value > 0.600 or < −0.600

TABLE 22
Second harvest Pioneer inter-set correlations associated with
canonical correspondence analysis of unrelativized data

| | Correlations | |
|---|---|---|
| Response Variable | Axis 1 | Axis 2 |
| SPAD | 0.055 | −0.155 |
| Height | −0.063 | 0.326 |
| Pods Per Plant | −0.300 | 0.155 |
| Root Length | −0.119 | 0.984* |
| Nodules Per Plant | −0.968* | 0.140 |
| Nodule Mass | −0.57 | −0.225 |
| Shoot Dry Mass | 0.004 | 0.373 |
| Root Dry Mass | −0.305 | 0.432 |
| Total Dry Mass | −0.078 | 0.253 |
| Shoot/Root Mass Ratio | 0.429 | −0.277 |
| Seeds Per Plant | −0.268 | −0.336 |
| Seed Dry Mass | 0.002 | −0.03 |
| Auxiliary Branches | −0.106 | −0.137 |
| Pod Dry Mass | −0.033 | 0.015 |
| Above Ground Dry Mass | −0.018 | 0.198 |
| Oil | −0.013 | 0.079 |
| Protein | 0.015 | −0.150 |

*Indicates R² or R-value > 0.600 or < −0.600

### Second Harvest Follow-Up Analyses

[0165] After the second harvest, PERMANOVA analyses associated with Bray-Curtis ordination indicated differences between bacterial treatments likely exist, but MRPP analyses indicated differences likely do not exist. CCA results also showed differences exist among treatments according to both MRPP and PERMANOVA tests. Because PERMANOVA associated with Bray-Curtis ordination, and both MRPP and PERMANOVA associated with CCA showed differences, these differences were investigated further following the same procedures used after the first harvest. Kruskal-Wallis tests for non-parametric data and two-way ANOVAs on parametric data were performed to examine the effect of cultivar and bacteria on each response variable tested. The following response variables significantly differed (p<0.05) between cultivars: SPAD, height, root wet mass, nodules per plant, root dry mass, root-to-shoot mass ratio, and number of seeds per plant. Asgrow plants displayed higher values for all of these variables except shoot-to-root mass ratio and number of seeds per plant (FIG. 9). No significant differences were observed for bacterial treatments.

### Iron and Phosphorus Solubilization

[0166] After inoculating Blue CAS agar with each inoculant strain, all bacterial inoculants formed an orange halo around each respective colony on all plates, and a transparent halo formed around colonies grown on all NBRIP plates (FIG. 10). No halos formed in the control quadrants for either type of media. These results indicate all three inoculant strains solubilize both P and Fe.

Recovery of Bacteria from Nodules

[0167] After sterilization of the outside of the nodules, crushing the nodules in saline solution, and plating the saline solution on KBC media, inoculant strains of bacteria could not be recovered. Additionally, Bradyrhizobium spp. or any other bacteria could not be cultured on YMA media. These results indicate none of the bacteria within the nodules from either harvest survived. Also, after rolling the outside of the nodules on KBC media then streak-plating colonies onto modified LB media, none of the bacteria from the outside of the nodules appeared identical to the colony morphology of the inoculant bacteria, but some colonies did show morphological similarities. These samples were sent in for 16S rDNA sequencing to determine whether there were any matches with the inoculant strains, but results were inconclusive. Due to logistical challenges arising from the COVID-19 pandemic, these strains could not be resequenced.

### Genome Comparison

[0168] According to the ANI calculator, the genomes of the three bacteria used during inoculation were 100.00% identical. Although this value indicates there were no differences among the strains, it displays results out to two decimal places, and small variations (<0.01%) were evident, because the standard deviation for each comparison was greater than zero. Table 23 shows the ANI standard deviation and number of DNA fragments used to for each comparison made.

[0169] Output from LINbase showed similar results to those found using the ANI calculator. LINbase is not designed to compare select genomes and only allows users to compare newly uploaded bacterial genomes to those already in the system, so not all the comparisons made using the ANI calculator were able to be made using LINbase. Nevertheless, after the first of the three genomes was added, it served as the most closely related reference strain for the other two.

[0170] Consequently, several comparisons between several of the bacteria's genomes were made. Bullseye's genome was the first of the three added, and it was 90.174% similar to the closest genome already uploaded, Pseudomonas fluorescens SBW25. Pancake's genome was uploaded next and was 99.975% similar to that of Bullseye's, and Starfish's genome was 99.980% similar to that of Pancake's.

TABLE 23
Average nucleotide identity standard deviation and
number of DNA fragments used to make comparisons
between each of the three bacteria used for
inoculation. The average nucleotide identity
between all three comparisons made
was 100.00%. Results are based on two-way ANI values.

| Comparison | Standard Deviation | Number of DNA Fragments |
|---|---|---|
| Bullseye-Pancake | 0.11% | 31245 |
| Bullseye-Starfish | 0.04% | 31002 |
| Pancake-Starfish | 0.13% | 31728 |

### Discussion

[0171] The results of this study show Pseudomonas spp. isolated from soybeans of one cultivar and used to inoculate other cultivars affected indices of growth and NF after the 1st harvest but results associated with the 2nd harvest were inconclusive. In general, 1st harvest results indicate measures of growth and NF increased in response to Pancake, but there are several caveats to this conclusion. Data associated with increases in growth and NF following inoculation were derived from multivariate analyses, and clustering patterns of Pseudomonas spp. strains differed from clusters representing the uninoculated controls, but only Pancake consistently differed from controls according to both MRPP and PERMANOVA tests associated with Bray-Curtis ordination and CCA. While there were vectors of strong association among response variables, a separate ANOVA analysis did not show significant differences between inoculated plants and controls for any variables, except root length. Notably, inoculated plants generally resulted in greater but not significantly different mean values for these variables (e.g. nodules per plant, nodule mass, plant height, etc.) according to ANOVA results. It was therefore hypothesized that further study would confirm these Pseudomonas spp. strains promote growth and NF.

### Inoculants Affect Indices of Growth and Nitrogen Fixation at 1st Harvest

[0172] Because all MRPP and PERMANOVA analyses associated with Bray-Curtis ordination, and all but one of the MRPP and PERMANOVA analyses associated with CCA (MRPP analysis of Asgrow data) showed plants treated with Pancake significantly differed from controls, there is sufficient evidence to conclude Pancake has a significant effect on measures of soybean growth and NF. Only one response variable serving as an indicator of yield, flowers per plant, was measured during the first harvest. While the mean number of flowers on plants treated with Pancake was 14% higher than that of control plants, ANOVA analysis showed this value was not significant. It also did not have a strong influence over the model according to any of the Pearson and Kendall correlations or inter-set correlations in the multivariate analyses. Since this value was not significant, it did not display a high value in the Pearson and Kendall or inter-set correlations, and no other parameters for yield were measured during the 1st harvest.

[0173] Follow-up analysis of each parameter measured during the first harvest showed only root length differed between treatments. Specifically, soybeans treated with Pancake had 33% longer roots on average than controls (FIG. 6). This finding is consistent with other research that shows Pseudomonas spp. isolated from mungbean (Noreen et al. 2015) and soybean (Kumawat et al. 2019) nodules promote root growth. Additionally, longer root systems have the potential to improve soybean yield under certain conditions. Hirasawa et al. (1998) measured root length at flowering and found soybeans with longer roots had higher yield at the end of their life cycle then soybeans with shorter root systems when grown during hot summer months under irrigated conditions. They attribute this higher yield to lower resistance to water transport in plants with more developed root systems and suggest such characteristics will likely improve drought tolerance.

[0174] Increased rooting depth, which is associated with root length, has been shown to increase drought tolerance in a variety of plant species such as maize (Hund et al. 2009), rice (Li et al. 2005), wheat (Wasson et al. 2012; Li et al. 2019), and soybean (Cortes and Sinclair 1986).

[0175] Consequently, if Pancake increases root length, it may increase drought tolerance in soybean. This hypothesis is supported by research that shows adding PGPR to plants can increase root growth, influence root structure, and improve overall drought tolerance (Ngumbi and Kloepper 2016). Production of phytohormones is a common means by which PGPR influence root growth, but environmental factors (Kudoyarova et al. 2019), interactions among different phytohormones, and different concentrations of phytohormones (Weathers et al. 2005) all influence the effect phytohormones have on root growth. One cannot simply conclude that a bacterium that produces phytohormone X will stimulate root growth.

[0176] On a related note, Naseem and Bano (2014) inoculated maize with several PGPR, including one Pseudomonas spp., and found the bacteria increased root length, shoot and root mass, relative water content, and other variables under drought stress thus indicating increased drought tolerance. In addition to more developed root systems, the authors attribute improved drought tolerance in inoculated plants to the PGPRs' ability to produce exopolysaccharides (EPS), which help bacteria survive drought stress (Chenu and Roberson 1996; Or et al. 2007).

[0177] The authors hypothesize the EPS produced by bacteria likely confers drought resistance to plants the bacteria colonize. This is noteworthy, because the bacteria used in this study produced substances that appeared to be EPS when grown in liquid media and on agar plates.

[0178] Consequently, their ability to protect plants from drought stress may be a worthwhile subject of future study.

[0179] Although root length was the only response variable to significantly differ among treatments when analyzed using univariate statistics, root length is likely not the only variable causing plants treated with Pancake to differ from controls in the multivariate analysis. Only one of the Pearson and Kendall correlations (Table 12) shows root length had a strong influence over the model (R-value or R2>0.6 or <−0.6 on at least one axis). Why then might multivariate analyses show plants treated with Pancake are significantly different from controls?

[0180] Root length was the only response variable to significantly differ among treatments when analyzed using univariate statistics, but the combination of all the response variables, when taken collectively, showed differences based on MRPP and PERMANOVA analyses following the 1st harvest. This finding was interpret as evidence showing Pancake significantly affected parameters for growth and NF without significantly influencing any single response variable measured in isolation, except root length. Additionally, the treatment means for each response variable, when observed separately, indicate Pancake generally increased indices of growth and NF.

[0181] FIGS. 11A-11Q shows plants treated with Pancake displayed higher, though not significantly different, means for every response variable, except volumetric water content and root wet mass, which are less relevant than many of the other response variables. Root wet mass is less relevant than root dry mass, because plants were well watered and residual water remaining after washing roots may have caused minor discrepancies in measurements.

[0182] Volumetric water content was one of the ancillary response variables that did not directly measure growth, yield, or NF. When taken in conjunction with the results of the MRPP and PERMANOVA tests, the higher treatment means caused by Pancake generally support the hypothesis that Pancake increases soybean growth and NF during the early stages of soybeans' life cycle.

[0183] It is worth noting, nodule number per plant was the only response variable to have a strong influence (Pearson and Kendall R- or R²-value or inter-set correlation value of >0.6 or <−0.6 on at least one axis) on vectors associated with all four 1st harvest Bray-Curtis plots and both canonical correspondence analysis plots (Table 7, Table 8, Table 9, Table 10, Table 11, Table 12).

[0184] Pancake caused a 17% average increase in the number of nodules per plant. It also caused a 68% average increase in nodule mass, and nodule mass had a strong influence on variables associated with two Bray-Curtis plots (Table 9 Table 10). Also noteworthy, the Pearson and Kendall nodule mass R-value for Axis 1, Pioneer relativized data was −0.593, which was near the threshold of ±|0.6| used for considering a response variable influential over the model (Table 12).

[0185] Nodule mass data was not normally distributed, so a Kruskal-Wallis test was used to assess the difference in means among bacteria. While no significant differences were observed, nodule mass still had a noteworthy p-value of 0.098. These results show further research into the effect of Pancake on nodulation is worth pursuing. Additionally, other studies showing Pseudomonas spp. increase soybean nodulation (Nishijima et al. 1988; Polonenko et al. 1987; Egamberdieva et al. 2017; Kumawat et al. 2019), provides further impetus for studying the effect of Pancake on nodulation.

[0186] The most restricting component of symbiotic NF between Rhizobium spp. and legumes is phosphorus (Khan et al. 2007), and P supply influences nodule number and nodule mass in soybeans (Tsvetkova and Georgiev 2003; Miao et al. 2007). More specifically, increases in P lead to increases in nodulation. Because the bacteria used in this study solubilize P, they likely made P more available to the soybeans in this experiment. The increased availability of P may therefore explain, at least in part, the increases in number of nodules and nodule mass in the plants.

[0187] Iron availability may have also influenced nodulation in this study. Nodulation is positively correlated with iron availability in legumes (O'Hara et al. 1988; Tang et al. 1990; Jamal et al. 2018), and iron is an essential component in enzymes and proteins that make up the N₂ fixing machinery in diazotrophs (O'Hara 2001). Consequently, iron is essential to the NF process. Additionally, there is evidence that plants take up iron via siderophores produced by Pseudomonas spp. (Wittenberg et al. 1996; Sharma and Johri 2003; Sharma et al. 2003). Since the study indicates the bacteria stimulate nodulation and can produce siderophores, it is reasonable to hypothesize the bacteria increased soybean nodulation by improving accessibility to iron.

[0188] Although these bacteria were originally isolated from soybean nodules, bacteria, including Bradyrhizobium spp., were not recovered from the nodules. It is possible freezing and thawing of the nodules killed the bacteria within. Further work should therefore be conducted to confirm whether these bacteria are present within the nodules.

[0189] The fact that the Kendall and Pearson correlations showed number of nodules per plant and nodule mass had a strong influence over the model is interesting. Though it was not determined whether the inoculant strains colonized the nodules following inoculation, the results of this study still provide evidence supporting the hypothesis that the bacterium Pancake augments nodulation, and by association, NF. These findings are consistent with research showing Bacillus spp. isolated from nodules of red clover (Trifolium pratense L.) increased nodulation when co-inoculated with Rhizobium sp. (Sturz et al. 1997). While 1st harvest data show Pancake increased soybean growth and NF, there was evidence showing the effects of Bullseye and Starfish on soybean growth and NF as well.

[0190] Although, the MRPP and PERMANOVA tests displayed inconsistent and therefore inconclusive results regarding the effects of Bullseye and Starfish on soybean productivity, this study does provide some evidence showing Bullseye and Starfish may affect soybean growth and NF. Both Bray-Curtis PERMANOVA tests resulted in significant differences between controls and Bullseye and between controls and Starfish for both cultivars, and the unrelativized MRPP test resulted in significant differences between controls and Starfish for both cultivars (Table 4).

[0191] FIGS. 11A-11Q shows treatment means for all response variables except volumetric water content and stomatal conductance are higher, albeit not significantly different, for plants treated with Bullseye than for controls. Volumetric water was one of the ancillary variables and is not an indicator of growth, yield, or NF, so it is less relevant than other response variables, and stomatal conductance was considered a less reliable measure of growth than other indices, because it is an indirect measurement of growth and may not accurately predict growth. Stomatal conductance is correlated with CO2 assimilation (Ball et al. 1987), but large amounts of photosynthate are dedicated to rhizodeposits (Kuzyakov and Domanski 2000; Butler et al. 2004).

[0192] Consequently, large portions of assimilated CO₂ may not be dedicated to growth; hence, stomatal conductance is likely a less reliable indicator of growth than other, more direct measurements. Since 15 of the 17 response variables measured show plants inoculated with Bullseye had higher, though not significantly different, means than controls, it is reasonable to conclude Bullseye increased soybean growth and NF when considering all the response variables collectively and when considering the results of the Bray-Curtis PERMANOVA analyses separately from the MRPP analyses. However, because results of the Bray-Curtis MRPP analyses conflicted with PERMANOVA results, and because among all the CCA results only PERMANOVA analysis of Asgrow data showed Bullseye differed from the control, there is not enough evidence to conclude Bullseye had a significant effect on soybean growth and NF when the totality of evidence presented in this study was consider.

[0193] Comparisons of individual treatment means for each response variable is less telling for Starfish than for Bullseye (FIGS. 11A-11Q). Only 10 of the 17 response variables showed plants treated with Starfish had higher treatment means than controls, none of which were significant when analyzed individually. For most response variables, the treatment means for plants inoculated with Starfish were lower than those treated with Bullseye or Pancake. Because multivariate tests show conflicting results, and because plants inoculated with Starfish had lower mean values than other treatments for many response variables, there is insufficient evidence to show Starfish increased soybean growth, yield, or NF. It is reasonable to conclude Starfish had an effect, but the type of effect, positive or negative, is unclear. Additionally, none of the univariate statistics revealed any differences between plants treated with Starfish and controls, so further study into the effects of Starfish on soybean is lower in priority than studying the effects of Bullseye and Pancake.

### Effects of Bacteria at 2nd Harvest are Inconclusive

[0194] Results of the MRPP analyses and the PERMANOVA analysis following the 2nd harvest showed conflicting results. No significant differences were observed in either Bray-Curtis MRPP analysis, but the PERMANOVA analysis of both relativized and unrelativized data did show significant differences (Table 13). PERMANOVA analysis of relativized data resulted in significant differences among all pairwise comparisons, and analysis of unrelativized data showed differences exist between controls and Pancake, between controls and Starfish, and between Starfish and the other two bacteria (Table 14). Additionally, all CCA tests showed differences exist among the treatments (Table 15), and pairwise comparisons show controls differed from Pancake and Starfish for both tests for each cultivar (Table 16).

[0195] Because no treatment consistently resulted in significant differences across MRPP and PERMANOVA analyses associated with both Bray-Curtis ordination and CCA, and because univariate analyses did not show any significant differences between bacteria and controls, this was not considered enough evidence to draw firm conclusions regarding the effect of the bacteria on soybean growth, yield, or NF at the time of the 2nd harvest. Furthermore, FIG. 12AV shows similar means among treatment groups for most response variables, and the Bray-Curtis plots of 2nd harvest data (FIG. 7) and the Pioneer CCA plot (FIG. 8B) show substantial amounts of overlap among treatment groups. These figures provide visible evidence supporting the conclusion that there are no detectable differences among treatments after the 2nd harvest.

Why are there Different Effects on Soybean Productivity at Different Timepoints?

[0196] Results indicate Pancake caused significant increases in soybean growth and NF following the 1st harvest, but it had no effect on 2nd harvest soybeans. If Pancake affects soybeans during an early stage in their life cycle, it is logical, though not imminent, to expect the same trend to continue into later stages. For example, given adequate water and nutrients, if Pancake caused plants to develop biomass at a faster rate than other treatments, the plants should accumulate water, nutrients, CO₂, etc. at a faster rate due to larger root systems, greater leaf surface area for photosynthesis, and other factors. Consequently, the total amount of water, nutrients, etc. accumulated over time should increase, and the total amount of growth, yield, and N2 fixed at the end of the plants' life cycle should increase in response. The plants were well watered, and no signs of nutrient deficiencies were apparent, so water and nutrients likely were not growth limiting factors. Thus, if the bacteria used in the study benefit soybean, the bacteria are expected to increase soybean growth rates and cause greater overall growth, yield, and NF as soybeans approach maturity.

[0197] This hypothesis is supported by research that shows high shoot biomass at the beginning of soybean's life is highly correlated with increased growth rate (Vega and Sadras 2003). Also, Malhi et al. (2007) show fertilizer application during early stages of growth is important for legumes to reach maximum biomass and yield. If the bacteria used in the study solubilize nutrients, their effects on plants might be analogous to application of fertilizer: applying PGPR during early stages of growth should increase growth and yield at maturity. Yet this is not what was observed. Why then did Pancake have no effect on 2nd harvest soybeans? The reasons for this response are unclear, but the empirical evidence indicates bacteria have a different effect on soybeans than chemical fertilizers.

[0198] The behavior of bacteria applied to soil as biofertilizers is fundamentally different from that of chemical fertilizers, because (except in the case of N2-fixing bacteria) biofertilizers increase solubility of nutrients already in the soil (Mohammadi and Sohrabi 2012), whereas chemical fertilizers add nutrients. One study shows the effects of phosphorus fertilization on plant uptake ranged from 2.6-6.5 years depending on soil type (Eghball et al. 1990). Yet noticeable effects of bacteria applied as biofertilizers are unlikely to last nearly as long. Nutrient limitations, especially carbon, limit microbial growth in soil (Demoling et al. 2007).

[0199] Consequently, many bacteria added as inoculants will compete with indigenous microbes for resources and die off until the soil's natural carrying capacity is reached. The remaining inoculant bacteria will eventually reach a state in which they co-exist with indigenous microbial populations at much lower population densities than those present when they were originally applied. In some cases, it's possible they may not survive at all. The effects of biofertilizers may therefore wear off relatively quickly in many cases. This phenomenon in which the inoculant bacteria die off over time might explain why the bacteria used in the study affected soybeans during early stages of growth but not during later stages.

[0200] Some runners in a race may jump off the starting blocks and reach their top speed faster than their opponents, but just because they reach their top speed faster than their opponents does not mean they will finish far ahead. Other runners may match a leader's speed shortly after the start. In a similar manner, Pancake may have caused plants to grow significantly faster than other treatments in the days and weeks immediately following inoculation, but the difference between growth rates during this period was not enough to cause significant differences in growth or NF over the course of the plants' lifespan.

[0201] If Pancake increased the rate of growth and NF early on in the soybeans' life cycle, it's possible multiple inoculations would maintain this faster rate for a longer period of time. If this faster growth and NF rate were maintained over time, the total growth, yield, and NF would be expected to increase. Research shows repeated inoculations with beneficial microorganisms cause greater increases in plant growth than single inoculations (Azcon 1993).

[0202] Another possible reason why the 1st harvest may have resulted in differences but not the 2nd harvest is the constraints caused by the pots. Plants inoculated with Pancake had longer roots than controls after the first harvest, but the pots may have constrained growth as the plants grew larger and could have caused plants to cease growth prematurely. This notion is supported by a meta-analysis that concluded pot size constrains overall plant growth and may change experimental results (Poorter et al. 2012). If pots constrained root growth, such constraints may have counteracted the effects of the bacteria on root growth, which could have also reduced growth and other functions elsewhere in the plant. More specifically, constrained roots can reduce plants' ability to take up nutrients from the soil, which in turn can suppress growth (Poorter et al. 2012). Also, constraints on roots may cause plants to release signals suppressing aboveground growth (Young et al. 1997). Future studies should therefore test the effects of Pancake on plants under conditions where root growth is less constrained.

[0203] The soybeans were planted late in the season and the photoperiod during this time appeared to cause plants to mature early thus preventing them from reaching their maximum size. Both cultivars were part of the same maturity group (group 4), so differences between cultivars were likely not attributed to different responses in photoperiod. Nevertheless, it is possible the effects of the different bacterial treatments may have been deemphasized since the plants matured more quickly. If the plants matured more quickly, they would not reach their maximum size and yield. If the bacteria increased the soybeans' maximum growth potential, but the soybeans were unable to reach their maximum potential due to their response to the photoperiod late in the season, the effect of the bacteria on soybean growth may be less apparent.

[0204] Finally, it is worth noting the natural variability of the various response variables measured made it difficult to detect differences with the sample sizes used in this study. A power analysis shows five repetitions of each bacteria-cultivar treatment combination per harvest and ten repetitions for each bacterial treatment per harvest were not enough to detect differences for most response variables when analyzed individually, especially during the 2nd harvest (Table 26 and Table 27).

[0205] There was a large variation in the number of repetitions needed to detect differences in different response variables, and the second harvest required larger sample sizes to detect differences than the first harvest. When analyzing second harvest data, a sample size of 10, 12, and 15 plants per bacteria-cultivar combination would have allowed us to detect differences among bacterial-cultivar treatment interactions in 63.6%, 72.7% and 86.4% of response variables respectively when effects were present. Larger samples sizes than these would be needed to detect differences among bacterial treatments alone, and such large sample sizes would be impractical to implement.

### Relevance of Findings

[0206] The strains used in this study were taken from the cultivar 5002T, one of the cultivars used by (Sharaf et al. 2019), but they were not among the most abundant Pseudomonas present in nodules. Among Pseudomonas spp. found in the preceding study by Sharaf et al. (2019), the bacteria in the study ranked 41st out of 412 OTUs and made up 7% of the total Pseudomonas spp. population (unpublished data). They only made up approximately 0.4% of the total bacterial population, which contained 4068 OTUs. OTUs were based on the 341F-785R region of the 16S rDNA gene.

[0207] The findings of this study are important because they show non-Bradyrhizobium spp. bacteria isolated from soybean nodules affect soybean productivity and likely benefit the plant, which provide impetus for further investigation into the possible benefits of non-Bradyrhizobium spp. nodule endophytes. If the bacteria in the study were relatively low in abundance compared to other Pseudomonas spp. in the nodule, but they still benefit the plant, other Pseudomonas spp. found in greater abundance may provide even greater benefits to soybeans than those used in this study. This study provides promising evidence that such nodule endophytes have the potential to be developed into biofertilizers.

### Conclusion

[0208] Results of the multivariate analysis show Pseudomonas spp. isolated from soybean nodules of one cultivar and used to inoculate other cultivars significantly affected indices of growth and NF during early stages of the soybeans' lifecycle but affects during later stages were not detected. When indices of growth, yield, and NF were analyzed individually, only root length significantly increased in response to bacterial inoculation, but the means of most indices were generally higher in inoculated plants than in controls. Taken collectively, these results generally support the hypothesis that Pseudomonas spp. isolated from soybean nodules increase soybean growth and NF, but further testing is needed to corroborate these findings before drawing firm conclusions. These findings are important, because they show non-Bradyrhizobium spp. bacteria within nodules have the potential to increase soybean productivity. Future work should therefore focus on culturing similar nodule bacteria and identifying strains with the most beneficial effects on soybean growth, yield, NF, drought, and other important traits.

### Variance and Distribution

[0209] The variance of cultivar and bacteria data was assessed separately for each harvest. Because data did not have equal variances and normal distributions for all response variables, non-parametric multivariate tests, PERMANOVA and MRPP, were used to analyze the data. First harvest variance also includes concatenated cultivar-bacteria data, because interaction effects were tested following multivariate tests. If concatenated data showed equal variances, and if data were normally distributed, two-way ANOVAs were used to assess the data. If variances of concatenated data were not equal, or if distributions were not normal, Kruskal-Wallis tests were used to test for differences among bacterial treatments. JMP version 15 software was used to test normality and variance. Anderson-Darling's test was used to assess normality, and Levene's test was used to assess variance.

TABLE 24
First harvest distribution and variance for cultivar, bacteria, and
concatenated bacteria and cultivar data for each response variable.
Anderson-Darling goodness-of-fit p-values > 0.05 indicate normal
distribution and Levene p-values > 0.05 indicate equal variance.

| | | | | Concatenated |
|---|---|---|---|---|
| | | | | Cultivar- |
| | Distribution: | Cultivar | Bacteria | Bacteria |
| | Anderson- | Variance: | Variance: | Variance: |
| Response | Darling p- | Levene p- | Levene p- | Levene p- |
| variable | values | values | values | values |
| SPAD | 0.950 | 0.411 | 0.358 | 0.382 |
| Stomatal | 0.074 | 0.312 | 0.882 | 0.780 |
| Conductance | | | | |
| Height | 0.838 | 0.512 | 0.029* | 0.208 |
| Flowers Per | 0.003* | 0.569 | 0.226 | 0.044* |
| Plant | | | | |
| Trifoliates | <0.001* | 0.015* | 0.576 | 0.015* |
| Per Plant | | | | |
| Trifoliate | 0.081 | 0.309 | 0.723 | 0.216 |
| Length | | | | |
| Volumetric | 0.436 | 0.835 | 0.146 | 0.474 |
| Water | | | | |
| Content | | | | |
| Root Length | 0.142 | 0.019* | 0.777 | 0.245 |
| Root Wet | 0.479 | 0.727 | 0.282 | 0.374 |
| Mass | | | | |
| Shoot Wet | 0.554 | 0.592 | 0.543 | 0.325 |
| Mass | | | | |
| Nodules Per | 0.300 | 0.633 | 0.092 | 0.001* |
| Plant | | | | |
| Nodule Mass | <0.001* | 0.105 | 0.007* | 0.032* |
| Total Wet | 0.768 | 0.972 | 0.993 | 0.429 |
| Mass | | | | |
| Shoot Dry | 0.060 | 0.316 | 0.591 | 0.500 |
| Mass | | | | |
| Root Dry | 0.482 | 0.232 | 0.878 | 0.537 |
| Mass | | | | |
| Total Dry | 0.149 | 0.257 | 0.799 | 0.598 |
| Mass | | | | |
| Shoot/Root | 0.002* | 0.611 | 0.875 | 0.231 |
| Mass Ratio | | | | |

TABLE 25
Second harvest distribution and variance for cultivar and
bacteria for each response variable. Anderson-Darling
goodness-of-fit p-values > 0.05 indicate normal
distribution and Levene p-values > 0.05 indicate equal variance.

| | | Cultivar | Bacteria |
|---|---|---|---|
| | Distribution: | Variance: | Variance: |
| Response | Anderson- | Levene | Levene |
| variable | Darling p-values | p-values | p-values |
| SPAD | 0.826 | 0.940 | 0.007* |
| Height | 0.166 | 0.475 | 0.862 |
| Pods Per Plant | 0.068 | 0.134 | 0.996 |
| Root Length | 0.051 | 0.057 | 0.569 |
| Root Wet Mass | 0.603 | 0.146 | 0.817 |
| Shoot Wet | 0.605 | 0.693 | 0.435 |
| Mass | | | |
| Nodules Per | 0.001* | 0.069 | 0.006* |
| Plant | | | |
| Nodule Mass | 0.863 | 0.375 | 0.004* |
| Total Wet Mass | 0.646 | 0.964 | 0.879 |
| Shoot Dry Mass | 0.240 | 0.622 | 0.836 |
| Root Dry Mass | 0.051 | 0.156 | 0.106 |
| Total Dry Mass | 0.239 | 0.776 | 0.668 |
| Shoot/Root | 0.180 | 0.906 | 0.531 |
| Mass Ratio | | | |
| Pod Wet Mass | 0.050 | 0.762 | 0.725 |
| Seeds Per Plant | 0.495 | 0.482 | 0.836 |
| Seed Dry Mass | 0.305 | 0.916 | 0.570 |
| Auxiliary | <0.001* | 0.399 | 0.305 |
| Branches | | | |
| Aboveground | 0.471 | 0.971 | 0.270 |
| Wet Mass | | | |
| Pod Dry Mass | 0.464 | 0.577 | 0.702 |
| Aboveground | 0.255 | 0.459 | 0.864 |
| Dry Mass | | | |
| Oil | 0.068 | 0.093 | 0.315 |
| Protein | 0.567 | 0.257 | 0.284 |

### Power Analysis

[0210] A power analysis for each harvest was performed using JMP's statistical power calculator to determine the sample size needed to identify differences among the treatment groups. Desired power was set to 0.8, significance was set to 0.05, and the mean value of each treatment group for each response variable found in the study was added to the statistical power calculator. This allows us to determine the sample sizes that likely would have been necessary to detect differences in the study. Two separate calculations were made for each response variable: one for bacterial treatments in which the means of all four bacterial treatments were entered, and one for bacteria-cultivar treatment combinations in which the eight treatment combination means were entered. The combined standard deviation of the Asgrow and Pioneer control groups was used in the standard deviation input in both calculations. The calculator output provided a sample size, and that sample size was divided by the number of treatment groups (four bacterial treatments and eight bacteria-cultivar combinations) to determine the recommended sample size per treatment. For reference, in this study a sample size of ten per bacterial treatment and five per bacteria-cultivar treatment combination in each harvest was used.

TABLE 26
First Harvest recommended sample size for interaction effect and
bacteria treatment. The associated standard deviation of combined
Asgrow and Pioneer control groups needed to determine differences
among treatments for each response variable is also shown.

| | Control | Recommended Sample | |
|---|---|---|---|
| | Standard | Size Per Treatment | |
| Response Variable | Deviation | Bacteria-Cultivar | Bacteria |
| SPAD | 1.08 | 3.4 | 13.8 |
| Stomatal | 54.8 | 7.0 | 60.0 |
| Conductance | | | |
| Height | 1.47 | 8.1 | 15.0 |
| Flowers Per Plant | 1.17 | 2.9 | 5.0 |
| Trifoliates Per Plant | 0.46 | 4.5 | 9.0 |
| Trifoliate Length | 1.36 | 7.0 | 13.7 |
| Volumetric Water | 0.03 | 10.5 | 36.8 |
| Content | | | |
| Root Length | 9.34 | 3.8 | 8.5 |
| Root Wet Mass | 1.99 | 27.3 | 151.3 |
| Shoot Wet Mass | 1.85 | 7.0 | 14.3 |
| Nodules Per Plant | 36.05 | 5.4 | 46.8 |
| Nodules Mass | 0.16 | 2.0 | 4.0 |
| Total Wet Mass | 3.30 | 3.1 | 34.8 |
| Shoot Dry Mass | 0.36 | 4.8 | 10.8 |
| Root Dry Mass | 0.13 | 29.3 | 109 |
| Total Dry Mass | 0.46 | 7.5 | 16.8 |

| | | |
|---|---|---|
| Average Recommended Sample | 8.4 | 34.4 |
| Size Per Treatment | | |
| Median Recommended Sample | 6.2 | 14.7 |
| Size Per Treatment | | |
| Standard Deviation | 7.9 | 40.0 |

TABLE 27
Second Harvest recommended sample size for interaction effect and
bacteria treatment. The associated standard deviation of combined
Asgrow and Pioneer control groups needed to determine differences
among treatments for each response variable is also shown.

| | Control | Recommended Sample | |
|---|---|---|---|
| | Standard | Size Per Treatment | |
| Response Variable | Deviation | Bacteria-Cultivar | Bacteria |
| SPAD | 1.31 | 5.0 | 13.3 |
| Root Length | 17.87 | 73.4 | 232.5 |
| Root Wet Mass | 4.56 | 8.0 | 17.5 |
| Shoot Wet Mass | 2.73 | 6.0 | 64.0 |
| Nodules Per Plant | 24.19 | 2.1 | 6.0 |
| Nodule Mass | 0.30 | 11.8 | 6960.0 |
| Total Wet Mass | 7.95 | 8.8 | 28.3 |
| Pod Wet Mass | 2.49 | 14.4 | 60.0 |
| Pods Per Plant | 8.80 | 201 | 646.8 |
| Seeds Per Plant | 3.64 | 6.9 | 63.3 |
| Seed Dry Mass | 0.43 | 12.3 | 183.3 |
| Auxiliary Branches | 1.00 | 25.2 | 125.8 |
| Plant Height | 3.18 | 3.6 | 22.5 |
| Total Aboveground | 4.23 | 7.3 | 42.3 |
| Wet Mass | | | |
| Shoot Dry Mass | 0.66 | 11.8 | 70.0 |
| Root Dry Mass | 0.28 | 2.6 | 75.8 |
| Total Dry Mass | 1.40 | 8.4 | 80.3 |
| Pod Dry Mass | 0.72 | 2.0 | 86.0 |
| Total Aboveground | 1.24 | 12.5 | 77.3 |
| Dry Mass | | | |
| Shoot/Root Mass | 0.44 | 3.1 | 92.5 |
| Ratio | | | |
| Oil | 1.04 | 3.0 | 13.8 |
| Protein | 1.58 | 9.9 | 68.0 |

| | | |
|---|---|---|
| Average Recommended Sample | 20.0 | 410.4 |
| Size Per Treatment | | |
| Median Recommended Sample | 8.2 | 69.0 |
| Size Per Treatment | | |

### Example 2: Obtaining Culture of Plant Growth Promoting Pseudomonas Derived from Soybean Cultivar 5002T

### Introduction

[0211] Diazotrophs are microbes capable of residing within soybean, Glycine max, as well as other legumes to provide usable nitrogen. This macronutrient is essential for soybean's plant health, yield, and resilience (Dashti, 1998). Typically, a greater diazotrophic foundation within the root nodules supports usable nitrogen concentration and uptake (Williams, 1983). Although this varies by species and strains of Bradyrhizobium, a natural community variability in nodules occurs (Abel, 1964). Within this microbial community, Pseudomonas spp. reside in the interior of soybean nodules along with Bradyrhizobium spp, among various cultivars (Sharaf, 2019)

[0212] Although the described Pseudomonas spp. are not considered diazotrophs, their presence within the nodule interior provides the opportunity for soybean to receive plant growth promoting rhizobacteria (PGPR) benefits. It is common for Pseudomonas spp. to exhibit the ability to release organic acids capable of solubilizing phosphorus (Trivedi, 2008) as well as other nutrients. Additionally, iron uptake improves from Pseudomonas populations in soybean by bacterial siderophore production (Sharma, 2003). Furthermore, some Pseudomonas are exemplary PGPR microbes with the ability to act as biocontrol by producing anti-pathogenic compounds as well as the ability to increase growth by the production of indole acetic acid (Karnwal, 2009).

[0213] Soybean cultivars are selectively bred to present desired characteristics, for example, high yield or drought tolerance, by crossing existing breeds with these traits (Pantalone, 2017). With many cultivars suitable for a variety of environmental conditions, it is essential to derive PGPR capable of improving growth for a variety of cultivars. In this study, the Pseudomonas PGPR culture was derived from a single cultivar and sample, 5002T, but shows evidence of promoting the growth of various soybean cultivars (Griggs, 2021). Eight other cultivars tested did not allow for the extraction of and isolation of bacteria, most notably the growth promoting bacteria described below, and so 5002T grown under relatively dry growing conditions is considered a source plant for these PGPR.

### Methods

[0214] On Virginia Tech's Kentland Farm, nine diverse cultivars were studied using a split-plot design with changes in water availability. Each cultivar was replicated 3×under two different water regimes (irrigated and non-irrigated; n=2). Each cultivar by water treatment was thus replicated 3× to arrive at 54 samples. The 54 samples were allowed 5 months of growth before harvest. Following harvest, nodules were removed from the roots. This is achieved by taking forceps and grasping the nodule off of the root and placing it in a 2 mL tube for storage at −20° C. Nodules were utilized for DNA extraction to achieve a relative abundance of each bacterial species residing within the interior of the nodule. Additionally, the nodules were used to grow viable bacterial colonies on selective media to culture highly abundant Pseudomonas spp. from the interior of the nodule.

[0215] The following materials and procedure achieves sterilized surface nodules and the extraction of viable bacterial colonies from its interior:

### Materials:

[0216] Autoclaved filter paper No. 2
[0217] Forceps or measuring scooper
[0218] 0.9% autoclaved NaCl solution in 50 ml tube
[0219] 1.00% NaClO and 0.1% Tween (bleach detergent)
[0220] Autoclaved DI Water in 50 ml in tube
[0221] 1 autoclaved 2 mL tube
[0222] Tryptic Soy Agar (TSA) and KBC plates
[0223] 60 Mesh Sieve
[0224] 1 mL pipet
[0225] L shaped cell spreader
[0226] Waste discard beaker

### Procedure:

[0227] Add 10-15 nodules to a 2 mL tube
[0228] Outside of hood pipet saline solution into original tube
[0229] Vortex for 30 seconds (5 secs at 8, 25 secs at 4), Level 4=˜1200 rpm; Level 8˜2500 rpm
[0230] Dump nodules onto sieve and rinse with DI water
[0231] Rinse original tube with DI water and place nodules back in with forceps or scooper
[0232] Repeat steps 2-5 two more times for a total of three saline rinses
[0233] Under the hood pipet bleach detergent into the same tube
[0234] Vortex for 30 seconds (5 secs at 8, 25 secs at 4) and let sit for 30 seconds
[0235] Pipet off half of the bleach solution and discard into waste beaker
[0236] Place10 autoclaved filter papers individually flat in the hood, similar to a lily pad. Use the same filter paper for the entire time you are using the bleach detergent.
[0237] Dump nodules onto filter paper
[0238] Aseptically place nodules back into original tube with sterile forceps or scooper
[0239] Repeat steps 7-12 once more with a new filter paper funnel for a total of two bleach rinses
[0240] Under the hood pipet DI water into the original tube
[0241] Vortex for 30 seconds (5 secs at 8, 25 secs at 4)
[0242] Dump nodules onto new filter paper funnel
[0243] Place nodules back into original tube with sterile forceps or scooper
[0244] Repeat steps 14-16 once more for a total of two DI water rinses. Use the same filter paper.
[0245] Dump all nodules onto TSA plate and roll them around the agar surface to test surface sterility
[0246] Place nodules into new tube with sterile forceps and store in −20° C. immersed in glycerol
[0247] Incubate for 5 days at 28° C.
[0248] After 5 days, check TSA plate for growth
[0249] Bacterial Extraction once the TSA, a general media, exhibits no growth use a sterile L shaped cell spreader to smash the nodules within the glycerol.
[0250] Vortex for 30 seconds on 5
[0251] Remove 100 microliters of the glycerol solution and spread it on a KBC plate using a sterile L shaped cell spreader.
[0252] Incubate for 48 hours at 28° C. and observe Pseudomonas growth

### Results and Discussion

[0253] This procedure was preformed on a harvested sample belonging to the cultivar 5002T (from a non-irrigated “drought” plot) from the described study. KBC is a selective media for Pseudomonas (Mohan & Schaad, 1987). It is important to note the use of KB+nitro agar plates allow for the growth of Bradyrhizobium, and should not be used for the selection of Pseudomonas. Sterility tests are essential in determining the surface sterility of the nodule to ensure all bacterial growth are from the interior of the nodule.

[0254] Cultured KBC plates were tested for fluorescence using a UV light table. Fluorescence is a common characteristic of growth promoting Pseudomonas among multiple strains, and of those capable of providing phosphate solubilization (Vyas & Gulati, 2009).

[0255] Using the determined abundance of the 5002T interior nodule microbiome community from DNA extraction in Sharaf's 2019 study, the 46th most abundant Pseudomonas strain was cultured on a KBC plate. Although this is not a highly abundant species, up to this point it was found difficult to culture higher abundant species. However, we knew this bacteria and others were present based on identification of DNA in the sample. This is common as the overwhelming majority of soil microbes have not been cultured in a laboratory environment (Stewart, 2012). This inability to culture bacteria from a community of microbes is still considered the state of the science today (Williams, Mark A).

[0256] The above picture illustrates the process of developing the mixed culture from the sample belonging to 5002T. Three KBC agar plates included growth of Pseudomonas spp. that were utilized in future soybean growth promoting studies. The plate on the left was a 1 mL spread of a liquid culture derived from nodules that had been surface sterilized and selected for growth. The selected colony was affectionately named “Pancake” after its morphology resembling the initial pouring of pancake batter onto a skillet. The purpose of the second streak plate, in the middle was originally intended to serve as an additional check to assess if it was a single strain. Multiple colonies were found and thus indicating the solution was composed of morphologically different types or strains of Pseudomonas. The plate on the right is from the serial dilution that was believed to be contaminated. However, after studying the plate, the suspected contaminated bacterial growth was identified as Pseudomonas that were extracted from the original sample plate. These Pseudomonads identified and shown to be morphologically and genetically (genomes) different, also include other unique isolates “Bullseye,” “Jellyfish,” and “Starfish,” which were named after their morphology on the original KBC plate.

[0257] Finally, after concluding there has been successful laboratory growth of four Pseudomonas spp., more studies were conducted to test their abilities as plant-growth promoting rhizobacteria. It is hypothesized that since these four strains were derived from a mixture of nodules, the >50 Pseudomonas variants identified, they may support soybean growth, or more likely support growth with already naturally occurring diazotrophs (Rhizobia) that must be pre-existing and present within the nodules. Pancake, when inoculated with soybean in a natural soil from Kentland Farm, Va, resulted in greater plant growth than uninoculated plants. Bullseye similarly supported greater soybean growth, but the other strains Jellyfish and Starfish did not show any evidence of growth support to soybean. This result showing no growth for these other wo bacteria Jellyfish and Starfish suggest no increased growth supported by these two bacteria. (Fredrickson, 2013).

[0258] It is possible these bacteria grow together on a culture plate because they are very similar except for a few genomic regions, and thus respond identically to culture conditions. They may also grow naturally in co-culture and may tend to grow together for that reason, but herein it is shown that Pancake and sometimes Bullseye was advantageous for supporting plant growth. Often bacteria that are the species but different variants (or strains), often have different effects on plant growth. Indeed, it has been described many times in the nodules of numerous legumes that strains of bacteria can have widely different effects (Checcucci et al. 2016; Griesmann et al., 2018).

[0259] Similarly, if correctly stabilized in the correct mixture of ingredients in solution, the bacterial mixture could also be considered a novel composition of matter.

### REFERENCES

[0260] Abel G H, Erdman L W Response of Lee Soybeans to different strains of Rhizobium Japonicum. Agron J. 1964:56:423.
[0261] Dashti N. Zhang F. Hynes R. Smith D L. Plant growth promoting rhizobacteria accelerate nodulation and increase nitrogen fixation activity by field grown soybean [Glycine max (L.) Merr.] under short season conditions. Plant Soil. 1998; 200:205-13.
[0262] Checcucci, A., Azzarello, E., Bazzicalupo, M., Galardini, M., Lagomarsino, A., Mancuso, S., Marti, L., Marzano, M. C., Mocali, S., Squartini, A. and Zanardo, M., 2016. Mixed nodule infection in Sinorhizobium meliloti-Medicago sativa symbiosis suggest the presence of cheating behavior. Frontiers in plant science, 7, p. 835.
[0263] Frederickson, M. E., 2013. Rethinking mutualism stability: cheaters and the evolution of sanctions. The Quarterly review of biology, 88(4), pp. 269-295.
[0264] Griesmann, M., Chang, Y., Liu, X., Song, Y., Haberer, G., Crook, M. B., Billault-Penneteau, B., Lauressergues, D., Keller, J., Imanishi, L. and Roswanjaya, Y. P., 2018. Phylogenomics reveals multiple losses of nitrogen-fixing root nodule symbiosis. Science, 361(6398).
[0265] Griggs R., Sharaf H., Doyle C., Williams, M. A. Pseudomonas spp. Isolated from Soybean Nodules Promote Soybean Growth and Nodulation. 2021. To be submitted to Journal Rhizosphere.
[0266] Karnwal, A. 2009. Production of indole acetic acid by fluorescent Pseudomonas in the presence of L-tryptophan and rice root exudates. Journal of Plant Pathology. 61-63.
[0267] Mohan & Schaad (1987) Mohan S K, Schaad N W. An improved agar plating assay for detecting Pseudomonas syringae pv. syringae and P. s. pv. phaseolicola in contaminated bean seed. Phytopathology. 1987; 77:1390-1395. doi: 10.1094/Phyto-77-1390.
[0268] Pantalone, V., Smallwood, C. and Fallen, B. (2017), Development of ‘Ellis’ Soybean with High Soymeal Protein, Resistance to Stem Canker, Southern Root Knot Nematode, and Frogeye Leaf Spot. Journal of Plant Registrations, 11: 250-255.
[0269] Stewart E. J. (2012). Growing unculturable bacteria. Journal of bacteriology, 194(16), 4151-4160. https://doi.org/10.1128/JB.00345-12
[0270] Sharma, S. B., Sayyed, R. Z., Trivedi, M. H., & Gobi, T. A. (2013). Phosphate solubilizing microbes: sustainable approach for managing phosphorus deficiency in agricultural soils. SpringerPlus, 2(1), 587.
[0271] Trivedi, P., and Sa, T. 2008. Pseudomonas corrugata (NRRL B-30409) mutants increased phosphate solubilization, organic acid production, and plant growth at lower temperatures. Current microbiology. 56(2): 140-144.
[0272] Vyas, P., and Gulati, A. 2009. Organic acid production in vitro and plant growth promotion in maize under controlled environment by phosphate-solubilizing fluorescent Pseudomonas. BMC microbiology. 9(1): 174.
[0273] Williams L E, Phillips D A. Increased soybean productivity with a Rhizobium japonicum Mutant1. Crop Sci. 1983; 23:246.

[0274] Unless defined otherwise, all technical and scientific terms used herein have the same meanings as commonly understood by one of skill in the art to which the disclosed invention belongs. Publications cited herein and the materials for which they are cited are specifically incorporated by reference.

[0275] Those skilled in the art will recognize, or be able to ascertain using no more than routine experimentation, many equivalents to the specific embodiments of the invention described herein. Such equivalents are intended to be encompassed by the following claims.

The application's sequence listing, which the Patent Office published only in electronic form, follows.

SEQUENCE LISTING (137 sequences)

SEQ ID NO: 1 - DNA, 79811 bp, Pseudomonas nodulensis
  misc_feature (15581)..(15645): n is a, c, g, or t
  misc_feature (48783)..(48809): n is a, c, g, or t
cacggcggtaacaggggttcgagtcccctaggggacgccatttgcgggaatagctcagttggtagagcacgaccttgccaaggtcggggtcgcgagttcgagtctcgtttcccgctccatattcaacaaaaacgccgatcagcaatgatcggcgtttttgtttgtgtgcgatttgtgcagagccgccgcaggcccgctgcggcagcgttcactgcgtcgtcagggcctcctgcgccggcatgaaaaaacgcgcaaacaactcggattgagacttgatgttcaatttgttgtagaggttgcgacggtgaactttgatggtctctgccgacaggttcagcttgccggcgatttctttgttggaaaaaccgctcaacagcaacttgagcacatctttttcgcgcgccgtgatttgcgtgcccagttgcacgatggcctctgaccagggtggcggttcgtcctggcttttttccgcatcggtctcaaagcacatgcgctgatgcatcaacgccattacccatggcttgatgatgtccagggtcgcgatctgctgcgggctgtagcgcacgttgctgccaaatgaaatgcacagcgttctgtcggcgtcgagttgtacgttgtactgcacctcatccacgctgatgtactgggcgaaatactggtggtaatactcggtggtcaggaagtgctccggcgcgatgtcggacagatgaaaaaagccgctctgcgggttttcgcggttggcaatgtagaacgggtcgagcaggtacagcccttttacatagcgctgggtcaacgcgtccacttcgtccgcatcggcgacctcagtcacgctgaccacccgtacctgctggtcgctgaagatcagcacgacccagttgtcgatctggacgtattcctttaacacacgaaccagtgagctccagaacgccgggcggttcagttgcatgatcagcgtcccggccgaccgatgccaggccaggttgtgaaggtcgagcgacatgtactacccctttagggttaggcattcatggggcggggctaagtacttctaggtatttactaatcggacgtgccgagtatattcacccctcagcggatgaaggccatgatggcctgtcgtttttgacaaggatagcgatatgagtcaaccccctttgcgcgccatgttcatggcggcgctggtctgtgtgggcgcgagcgcgccggtcttggcggccgaaccccgggtcaacctgtacaactggttcgggctgatcgccccggaaacacccaaggaattcgagcagaaaaccggcacccgcatgcacatggatgccttcgacagtgccgagatcatgcagagcaaggtcatggccgggcgtaccgggtatgacgtggtcgtcgccacgtcgaatgtcttgcccagcctgatcaaggccggcgtactggcgccgctggaccgctctcaactgagcaacttttcgcatatcgatccggagatgctggcgctgctttccgccaatgacccgggtaaccgctacgccgtgccctacctgtggggcaccaccggcattggttacgacgtggacaaggtcaaggccgccctgggtgagaatgccccggtggacagctgggacctgatcttcaaggaagagaacatcagcaagctcaagtcgtgtggcgtggcgatgctcgactccccgagtgaaatcatctcgatcgccttgcattacctcgggctgcccagcaatagccagaaccctgaggattaccagaaagcccaggcgctgctgctgaagatccgcccttacgtcctctactttgactcatcccgaacggatgccgactttgccgatggcaatatctgtgtagtcgtgggctgggcgagcggggcgctgatggcacaggccatcaatgaaaaaaacaacaccgggcgcaagattgcctacagcctgccgcgtgagggcgggttggtgtggtcggaaaacttcgtgctgctcaaggatgcgccgcatgccaaacaggggctggcgtttatcaactacatgcttgagccgcaagtgattgccaagagttccaaccacacgctgtaccccaacgccaacaaggatgccaccgagctggtcgaacagaagttgcgcgacaacccctggatttatccatccaaagagaccattgccacactggttccccttgaaccgctgcccttgaagttggagcgaatccgcacgcgtgtgtggaccaaagtgaagagcggcacgtgaccggctgaatgaccaggcatgtcgggcggttgcaggcgtgccgttgaaggagatcaatcatgggccaagccgaatatcagcgcgacgtgaagtcggacgatgacgaggcgtacacggaaatcgaagaacagatcggccactgtacgcccgaacaagcctgggccatgtattacgtctcgaccggcatggtgcgtgagtacattacgcgggcggtgatggagcacattggccggggcaaccgggcgctgctgctggagttcccggaactggcccgggccgaagagaaatcccgcttcctgctgccgctctaaccgcatgccgatcagtgatgatcggcatttttgtgtgtgcgcgggtttgccgctttggccaggcgcaccgtggcctcacggatttctgcctgattgagtgaggcaaagcccaggcgcagtgcgttttccggctggtccatcggtgaaaactgccgaccactgcgtacgaccagcccatgctccaatgcggttgccaccatctgctcgacgtttatccgatcttcaaaacgcacccacagcgccagcccgccttcgggttcgcgcaccctgatccgatcaccgaatgccgcatgcaggcagccctgcaagacttcgcggcgggcgcggtattccttggatacgcggcgcaggtgtttcttcaattcacccgcgttgatcaggtccgcgagcatcttctgcgccaccgcgtcagcatcgcccagcatcaacgcggcgttgccgtgcagggcttcaatgaccggtgtgggcgccaccacatagctgcagcgaaacgtggaaccgagcgccttggacaacgagccgacatagagcacatggcgctgcgaacggtcactggccagcggcaggtagggtcgcccgttgaagtgatattcgtggtcgtaatcttcttcgatgatgcagaagtcatgtagagccgccaatgccagcagctgttgtcgccgcgccgcgtgcaggctcacggtggtggggaattggtggtgtggtgtcagatagatcatccgcaccttgtgctcgcgacacaggtgatcgatctggtcggtgcggcagccttcgtcgtcgacgtccaccgtgaccagttgcgcacccagcttgcggaaaatctcccacgccggcgggtagctcaggcgttccaccagcaccacgtcgccaggcttgagcagcaggctggcgctcaggtacagcgacatctgggtgccttgggtcaggcagatattctcggcgctgaccgtcagcccacggttgttgctcagcatttcggccagggcacagcgcaactcatagccggtgccctcactgccatagcgcaccgtattagaggcgaagctgttgcgcagggcattacggtagtagcggtgcagcacggcttggggcagcaggcggtggtcactggtaccgttgtcgaaaaacagtgcgccatgccgatgctgcagcgccgtcacctgggcgttctgagtgaagtacggagcgttcgcctgcgccaggaggggcggtgcaaacgactgctgcacgcgggcaggcggatgcttgggcgccaattgcgcattgacgaaggtcccacgccgcggctcgctgaccagccagcctttggtcatggcttcttcgtaggccaggatcacggtcttgcggttgacgtcgagcaactgcgccatttcccgcgtacccggcagcaaggtgccgggcggcaagcgaccttcgacgattgccgtcaccaggccttcggcgatcttgcgataggacgcctggctggcgctctcgtccagcttgagcagcggtcgccatttacgcatctggaccatctgaagtatccaaaactggaggttttaatgggcctagtctagcgcaacaatcaagcctcactcacccctgaggttgttatgcacacacgtcatgtcatcgaactgtccccctcggggaaaacctttgcggccggtgacgaactgttgctggatgcgatgcttgccagcggtctgtcggtgccgttctcctgccggcgcggtgcctgtgggtcgtgcaaggtggtcgtggccgaaggggagtaccgggccaagacccttgcgccggacgcgccggcgccatgctatccattggccgccaatgaaatgctgttgtgccagagtcatgcctgcggcgacatgcgcctggaaattcctggctggtcgctggatacgccgacgctggtggtcgaggcacaggtcgtgagcaagcgcgcgctggctccagacatcgttgagctggtgctgatgccggacatgccattggcggcacgggagggccagtacctcaagttccgtctggtcgacggcgactcgcggtgcttctcgatcgccaacctgccggccgacgacgatgggcgcctggtcttccacattcgccgggtcagcggcgggttgttttccgaggtcctcctggacgacttgcacgctggcgatctggtgcaactggaggggccttttggtgcctgcacctggcaggaccatgacgatgcgcccgtggtcctgttcgccacgggcactggctacgccggcatcaagccgatcctgctgagcgccttgaagtgcaatgtcgaggtgacgttgtactggggtggcgcgcagccggcggacttttacgaccgtgtgttcctggaccagtcagtcatcgaccatccgcgttttcactggcacccggtgctggcgtcgcaggggcgggtgcaggaggtagcgctgggccacgggcatcactgggatgccgcccatgtgtacgcgtgcggcaacggcgcaatgatccgccaggtccgcgagcagtgcctcgacgcgggcttgccggctcaccggtttgtcgccgaagcctttgtgcccagcggtggcgcaggtgcgcaaacgccttcacctgcgtttgacccgatctgggaaaaggtcggcccccgttactcgttcgacggcatgctggcggcccgtgaccaatccatccgcgccctggcggccattgccagccggctgcgggtgggcatgactaccggcgaagccctcgacatggccgccgaacaactgctggcgatgggcgcgtcacacacctggcacccgacctatattcgcttcggcgccgacacggtccgcccaccccgcgaagggatcgaccgtcagcgcaggctgcgcgccagcgatatcgtcgtggttgacctggggccagtgtgggacggctacgagggcgactatggcgatacctttgtgttcggtgactcgccgctgcacctggcgtgcacgaccgcgctgcacgaagtgttcgacgagacccgcgacgcctggttgcgcggcctcaccggtcgcgaactgtatgacttcgccgagcagagcgccgtggcaaaaggctggaggctggcgcgcaatctcgcagggcatcgcctcgcggacttcccccacgcgttgttcgagaacaaggagttggcggatctggacatcccgccgagtgaaatggcctgggtgctggaaatccagctgtgccatcccacggaaccggtcggtggatttttcgaggatatgttgatgctgcaagcctgaagagcccgccattgcggcgggctccttaacatcagagcttcggcagttggccgatacggcccatcatttcggtgacgatctgcaggtcgagcaggaactggtcgacggtcttgaactcgccgtcggtgtgcccggtgtacttgacttccgggcgcgccaggccgaattgcacgccgttgggcagttcatgcaccgaggttgcgccggctgaggtgccgaacttgtgctccatgccgaggttttccgtggcgactgccagcaaggccttgacccactcaccttccggattgcggtacatcggctcggccaccgagtaggtgaagcccaccttgaccttggttttcttgtcccaggcgctcagtttgtcggcgatttcggccttgagtttctctggcgacttgcccttcggcacccgcaggttcaccgccagcttgaaggctttgtcatccaggccgacaaaggtcagcgaagtggtcagcggccccatgaactcatcggagaagcccacgcccaacttgccgcccaggtagtccaggccccagttgtcggccgcataccgcgccgcatcggtgatgtggttgtgcttgagggcgatcttgccgtcgacgctgtggatcagctccagcatgcgcgccaccgggttgaccccggactccggctcggaggagtgagcggacacgccggtgacggtcagcttgacgtctttgccgtcgaccttggcggccactgcaaaatcgccgccgttgcgcttggcgtattcgctgccggccttttgcaggctggcggccaactcggcaggtttgtcgctgacgaaggtcgccaccgacgccgacggaatctggttggtagccatgccgccggtcatcgcgatgatttccgcgcctttgccttcacccttgcgccgtgggaacgtcgccatcaccgtgccgtagcctttctcggcgatcaccaccggataaccgccatccagcgcgaggttgtactgcggtgtcgggttcttttcgaagtagtaggggatcgcgtcgccggaggtctcttcggtggtgtcgaccagcagcttgaaattgcgcgccagtggcagcttttcttccttgatcaccttcatggcatacatcgccacgacgatgccgttcttgtcatcttcggtgccacgaccgtacatgcggtcgccgatcagcgtgaccttgaacgggtcgagtttggtgccatctttgagcacccaattttccggcgtcaccggcaccacatcggcgtgggcgtggataccgacgacttcgtcgccactgccttccagggaaatctcgtacacgcggttgtcgacgttgcggaagttcaggttgaaggccttggccaggtcctggagcttgccggcgatcttgatgaattccgggttcttgtactgcggcaggccgtcgacgttgaaggtcgggatttccaccagttcgcgcagggtttcgagggcggctttgccgtacttcacccgagtgtagatgcccagcaggcgattgatttcgttctgctggtcggcgctcaggggtttgttgtcgaggaaggcattgattgccgggccgacgtcgctggtcttgcccaggtcgcctttagccagcgcgccgaggaaaccgcgaaaatcggtgatggacgtttcgttgaagttcttgagaatcgccgtgctttgctcgggcgtgatgttggcgaaggcggggcaggtaaccgccgacaggctcgccgcaaacagggtggcagccgccaattgcttgagtggaaagtgcatggagagacgcattcctttgcaggtagtgagtaggaggtttctgatcgatctgtcagaaacatttccacacactaccattagtcaggtgcctctggtcaatgctggccaggatggggctcggggtactcctcagtcacgtccaaggctctggcgtagggcccatcccacaactgctcatgcaattgcccgacacgcttggccatcgcttcgttgtgcatcaccacttccaggttgcgcgaattatccaggtagccacccagccaattgctggtgccgacccacgcaacttggccgtcgatctccatggtcttgctgtggatcacccgcgcatacgggataaacccttgtttggcctcgggcagggtcacgatcttgatctgcacgttgggcagcacggccaggctcttgaggtagggcagctccagcttgtcggtgttccagttggacaccatcagcttgatcgacaccccacgcgccgctgcagcgcgtacggcgttgtcgatcaccgcgtagtacggacgggtcttgtccggtccgtaggacaacggcgcgtagtccagcaattgcacgcgcacttcctgcttggcttcgctcaacaggcgcggcagttccagctgtgagtcgcccacgccaggcgggttgtagcgctgcgggctggcgaccaggtagttgccggtgcgcggtgcctccttgccagcaacgggcagcggcaccggctggttgtcggtcaaggcctgctgggcgttccagtcctggtcaaagatggcctgcacttggcccacgaccgttgcatcggtgatacgcagcccggtttcgtgaatgtgttccagcgagcgccaatcgaaattctggctgccgacaaacgcctgcttgccatccactaccaggtatttggcgtggatgatcccgccactcacacgggcgtagggcaagacgcgaaaggtcaggttggggatcgcgcgcaggcgttccagggtggaggcctccgacaacttgatgcctttttcttcgagcaaaaagcgaatcttcacaccgcgtttgccggcggcttccaggcgctcgatgacacggtccatcaccgaaccggggtgatcggcggcgtagaactggccgatatcgatgcggcttttggcgccgtcgaacagctcgctccagaccgggccgggctggcgcaggtcgtcggtgccgagggcgctgtccaccggtacggtgtgtaccagttcaaaccccggaatcgaaaagtccgcctgggccagcggactgaggagcaagccggcaaggccggcgatacgcaatttcaaggagacggacataacactctcttcactgatgtagtgagcgggcttgccccgcgctgggtggcgcagccgccccaaacattccaccgcgttgtcccagaaagaccgaggtgcctggatatggggtggctgcgccacccaacgcggggcaagcccgctcaccacaggtttatgcggtgcggctgtgcagcggcgtcggtacccgatgcggcacttcactctgcacacgggcaccggtggcggcgcggatcagcaggatcttcagctggtcgttgatgcgctccaggctgtcctggaagaagttgtggaacaccacgcagaacagcgcgatggcgatccccaggccggtggcgaacagggccgtgccgatgccgccggagatctgccctgggtcggacacgcccgccgtcgccagcgccttgaaggtgtcgatgatgccgaggatggtgcccagcaagcccagcagcggcgcggcggtggtgatggtttcgatgatccacaggctgcgggccagcggcgcgcgggtggtcaggtactgggtttcgatgacgtcatccagatccttgcgcgagccttgcgaggctttctgtgccagcaccggcaagaccatgctcagcggcaggctgtcacgccgggtcaggctctccggcaggtcgcgttcgctgtgcacgttggcgccgagcacctcgttcagcgcgcgggcctggcggcgtacatacgcgaagtaaatcccgcgctcgatggtgatgaagatcgcgatggccatcgcggcatacatcacatagaaggtgatgtcgtggagcaggttcatgtccatgttcacttacctcgcaattagaaattggcttccagggaaaccgtcacggtgcgttccaggcccacgatgtaggccgggtcgccgtcgcggaaaccgccgtaggtggccgcgttggtcttggtggtgtacacaccgtccaagtacttcttgtcgaacaggttgtcgacgttcaggcgcagggtcgcgtccttgaccaccttcttgtccactggcaggtagataccggcgccggcgttgaatacggtgcgcccggagatcgcttcgtcgttggtcaggtcgccgtagagcttgctggtgtacttgccgccgaaggtgccgtagaagcggccgtcgtcgtagccgatgttggcggccagcatgtttttcggcacgttggcgaactgcttgccgctggtgggcaatacgatcgctttgccggcgttgtatacggtcaggtcgtcttgctgctcggccttggtgtaggtgtaggaggtgtagtagttgaagtgattgggcagcaggccgctccactccagttccaggccgctgttgttgacggagccggcgttgatgtcggcgaagtcgccgttgatatcgcgcgacgacacctggcgatccttgaactgcatgtagaacaaggtggcggccacggtcatgtcttcatcggtgtagcgccagcccagttcgtggttccaactggtttccggcttggcgtcgatggagcctgcgcccttgtcgtacagcacgtagttctgcgggatgcgcatgttgcgcgacaggctgtagaacacctggtcgcgttcatccacctggtatttgaggccggcgttgggcagcagtttgttgtaggtctggttacgtttttctgcttgctcggtgaggctgccatggttggtgccgtcacgcttgacgttcatataggccagaccgccgatcagggtccagtccgagttgatgtaccaagtgtcctgggcccagaccttctgcgccggggtgatggtgaagcggtcgcggccctggatggtgttgccattggcatccaccaccgcctcattggagtccggccaggtatcgaccggcttgccattggccttgagcggaatgaacggctgggtctggctctggcgcgcgcgctcgtaccagtagcccacttgcacgctgtgatcgcccaggtcccagttcagtttggtggtgatgcccggacgccaggtctgggtacgtgaagggcggtagtacacgccgctgttcggggtgccgtcggcgttgtattgggcgccggtgggcaggttgcccaggtcgaacacgccgccctggttcgagccgcggttgagggcatagctggacgagccgacgccgctgccgttaccccagtagtagtacgggatcaccgacagcgcgaggttgtcggccagtttgaactgggtgttgagcacggcggtgaacgtctggaacgggttctgcgccagggcgtaataactgttgtacttgccgttgctacccacggtgggcgtggcggggtaagggtcgtacttgcggccgttctgctggaactgcgccttggtcagttggctgtaactgttgttgtcctgctcatggtacttgaggatcaggttggcggtgttgccatcgccggcatcgaagaagctgttccactcgactttgtccgcacgcacggcgcccgaaccgcgccacatctggccttcggtgtgggaggccgacagccagttgctcaggccgttgatctcgccggtgttgaggcgggcgaaggtcttgcgggtggcgttgctgcccatgacctgtttgacgaacgcaccggtttccttggtcggtcggatggtcacgatgccgatgttgccgccgctggagccgatgtgcgggccgtcggcttccgaggaaccctgggtgacgaagatctggtcgatgttttccggatcgcccagcaggttggagtacagcgcgtagttgccggagtcgttgatcggcatgccgtccaccgacatccccacctggtcggagttgaggccgcgcatggtgaagcgaaagcccgacaggccggtgttgtcttcgctggaaatgttcaagcccggggtgtacttgagcttgtccaccgcgttgccggtggcggtctgtttatccagcgcttccttggtcacggtggagcggcccttgatgctttcttcctgcaccatgtagccgccacctgccgtggccttgccctgaaccccaatagtcccgacgtcactgtcgcgggtgtcggccatgaccattccatggcccatgcttgcggcaacaagtgccagatgaatccgtgtgaacctcatctctgtcgtcctggtgtcgggtgcttattgcacgctgtagttgaaggtggcggtgaagcgctgctcattgcggcccccgaaggcttgctcggggaacggcttgacttgcttgatgcgacgcaagctgttggtggcggcccggttgagcaacatgctcgaggcctgggtttgcaagccggagtcgaggacccgaccctggcggtcgaccagcagccagatcaccacttcgccgctcgggcgttcgagggaagcctggcgtccggtggggtactgcttgtaggtgtccaactcgttgcgcaaccccttgaggtaaccgccttccagcgcttggccgtcgaccttgggcggggcgggcggcgcgggtgtcggtgctgcctgggccacaggtgccggtgccggtttggcggcgaccggaggtggtgtcggtactggcgttggcttggccaccacgggcttgggcacaggttttggcttgggctcaggcttgggttttggctgcggcttgggcggtggcggcggcggggctggctcggcctcttcatcctcgatcaccggcggtggcggctcttgttccaccaccggttccgggatcacttccggctccggctcgaccaacgccagctcgacggcggactcgtcatacaccggttcgaccttcaaggtctgggactggatacccagtgcaatcagcaccagggcgatcagggccgggacactgcccagcagctgacgcgcacgaaacaatacgtacatgatcaggacttacgcgtggcaatggacacggaggtaaagccacccagacgcagggtgtccatcacctccaccaggcgcgaaacctcgacgcctttgtcgctgttaacgatgatggtcgacttggtgtcaggcttttcggctgccttcaacgccggcaccagcgcatcgaccgtgaggtccttgccatccagctgcaactggccttccaggcccagggtcaggatgaatttgttctgtggcttgagctgctgcgaactgctggcgctcggcagctgggtcttcatgccgagggccggaatcacgttcaggctcacgagtacgaaaaacaccaggaggaacatcatcacgtcgatcatggggatcagttcgatgtgcgccttgcgttttttcggttcgtcccaggttctcattccgctaccccgttattgaattaggggcgacacgctaacaaccaaaaatgaccgattggttaactttaattgacggttttagggctctaggacgcgtctttcagatgactcttgagtcatttttgtgacgtaacagaattgaaacccggcaggggcattctcaaaaactttacatcgagggcccccagagatgagtagcgaattgccatgtctttccaccccgcggcttctattgagagcactggaaaagcaccaggccgagacgttgtgcaccctcgccaacgggccgaagatcgccgataacacggcgagtattccgtcgccctataccctgcaaacggcgcaggattttatcgacggcatgcaggagaaatttcgctctgtggggttgctgagcctgggcgtgcatgtgcgcgacagcggcgaactgatcggcatcgccagcctgcgcatcaatgcggctcatcactatggacaccttggcggctggacggcggcggatgcacgcaacctggggtatgcgaccgaggccgcgaccgcgttgatggactacggctttggcgaacttggcctgcaccgtgtgggcagccagtgtttcagtcgcaacaaggagtcggcgcgggtcatggagaaaatcggcctgcagtacgaaggctgcatgcgtggggcgtttctcaagaatggggtgcatgaagacatgctggtgttcgccaccctgcgtgaggattgggagtttcggctgtgagcggcgacgttgatcacggtcggcgccgggtcctcgccgggctggccgttgccaccaccttttcgatcctcagcccgtttgcgcgcagtgccggggtggactacccgttcaccttgggcgtggcctccggcgatccattgcccgacgggtttgtgatctggacgcgcctggcgccgctgttcaatgccgccgatggccggggtggcttgagccgcccggtgccggtgcgctggcgagtcgcccgcgatgcggcgatgacccgcgtggtgcgccagggcgaggtcatcgccactgagcgctgggggcattcggtgcatgtggaggtggcgggcctggagccgggcaggccgtactggtaccagttcgaagggctcggcgcgcaaagcccggtggggcagtcgcgcacggctccggcggtgcatgccatggtgtcggcacgcttggggtttgtctcgtgctcccattgggaacgtggctatttcagtgcgtatcgccacctggcgcaggagcaacccgacctggtgttttttctcggggactacatctacgacagttcctacgcggcggattccggcaagatcattcgcccccatggcagcggcaatgccgtcagcctgagcgactaccgcaaccgttatgccttgtacaaaaccgatccggatctacaggccctgcacgctgccgcaccgagcgtggcgacctgggacgatcacgaagtgcagaacgactacgccaaccgctggtcccaggacccgaagatcccggtggggcaatttctgcagcagcgggccgcggcctaccaggcgttttacgagcatatgccactgcgtgccagcagcttgccgaaagggccggacatgcgcatttatcgacgcatggactacggtcgattggcgcgtttccatgtgctggacggccgacagtaccgctccgaacaaccgtgcattctggcgaatggcagtcaccaggggcatatcgccgataacctctgtcatgacttgcgcgacccaggtcgcaccctgctcgggtggcaacaagaagcctggctggaccagggctttgcccagtcgacggcgcagtggaacatcattgcccaggacttgctggtggcgccgttgacccagcgcgacctgaccaaccacaaaccggggcgctggaccgatggttgggatggctacatggccaaccgttcacggatgctggcttccctcgagcgcaatcgggtcaacaatccagtgttctggggcggcgatattcattcgttctgggtgacggacttgcatgccgatggcaacaacccggattcgccggtggtcgccacggagttcgtcggtacgtcggtgacgtctgacgggccgccgtttgaggcgttcagcaagatcctgccgcttaacccccatgtgaaattctttgacagtcgtcagcgagggtatgtgtcggttgaggtgcaggagggcaggatgctcacgcacttgcgcgtgattaccgacccgcgtgatccggcggccaccgtgtcgacgctgaagtcgtttgtggtggagtcggggcgggcgggggcgatagaggtgtaagggatagacgcactttttgtggcgaatgagctgttgtggccagtggacttattgtggtgagcgggcttgttgtggcgagcgggcttgccccgcgttgggctgcgnnnnnnnnnnnnnnnnnnnnnnnnnnnnnnnnnnnnnnnnnnnnnnnnnnnnnnnnnnnnnnnnncgcagcccaacgcggggcaagcccgctcgccacaagggtgagtgcggctggttcaagcgatttcgtagcgtaccgacaacgcgccctttttctccgacaacgccaggatggtgacctggcccagttcacccaaggtctgcacatgagtgcccccacaggcatacgcaggcaattcgccaaagccgacctggcgggtgccgtcttccaggttcatatggcgagggtagtctgcggcgatccattggttgacctgttgctggatcgtctcggcttccatggctcgcgccgcgtcaccacgtataaaggtgatcttgccttcgcccggccagtgatgagccttgatcggcatccagcccaggctctcgcccacgttgccgatcaagtgcccggcggaatgcagccgggtatgcaacgcccggcgctgttcatcgacccgcgcgatgacgggacccggctccagcgggcggtcgatgtagtgcaccacgcgatcggcctcttggataacgcgcagcacagtgctctcgccgagccagccggtatcgaagggttgcccgccgccctgtggatgaaaaatcgtcgactgcaggatgaccgcgaactggtcctcatggggcgtgcaactcagcacctccagttcggcagtcaggtggtcgtgggtgaaaaacaggcgttcggtcatgatctacatccgcatcagggttctgcgggcagtataaatagtgcgcggatgggtgataatccgctcagttatcaatggacctgtgcaccatgagcatcaatctaccgttgccgctgctgggcgagatggcgattttcgtcaaagtggtggaaaccggcagcttctcccaagccgcccggcaactgggcgcttcaccgtcctcggtgagccgcagcatctcgcgtctggaaaaggccctggccacgcgcttgttgcaacgcaccacgcgcaaattacgcctgagcgaaggtggtgaagaggtgttcaagcgctgccaggagatggtcaacgcggcacgttcggtcatggagatcagcggacagttcacccacgaagccgaagggctggtgcgggtcagcgtgcccaaggccgtggggcggtttgtggtgcacccgcatatgccggagttccttcggcgttatcccaaggtggatgtgcagttgatcctggaggatcggcaggtggacctgatcgatgacaacgtcgacttgagcatccgcatcaccgacagcccgccgccggggctggtcggccggcagttattgcctatcgagcatttgttgtgcgcgacgccgcagtacctggccgagcatggagtgccgggccatccccatgatctgttggaacacagttgtatctacctgggggaaacgccaggggactcgcgctggaaattccgccaggcgggcaaggcggtgacagtggcggtgcgcggccggtatgcagcgaaccacaccggcgtgcggctggatgcagtgttgcaggatgtggggattggcagcctgccgtactttacggcgcgccatgcgctggaggaggggcggttggtgcaggtgttgccggcgtgggactttatcgcgtcctatcatggcgaggcgtggttgctgcattcgcccacgcgctatctgccgccgaagttgcgggtgtttattgattatctagtggcgtgcatggcgaaggagccgacattgcgacggcccattccggatcgctgatcagtgcttgctctggtcgtcgggcatggccagcagctgtttttcctggttccagtcgaacggttcgtcattctgttcggcttcaaaacggcgctcttccagggcctggtacaggtccagttcttcatcgggcatgaagtgcaggcagtcaccgccaaagaaccacagcaggtcgcgtggcaccaggtgggcgatctgtgggtagcgcaggatgacctggctcatcaggtcctggcccaggtactggctttcgatcgggtcgatcggcagcagggcgcgcagttcgtcgaaacgctccaggaacagggagtggctttcctcgggcacctgttcggcttcgccgacggcaaccaggatgctgcgcaagtggtcgagcaagacgagatgatcggcaacgacgttggacacgagataagtcctctaaagcaaaaacgggcgcgagagtatatagctcggtgccctgcctcacaaatacgattcattttgacgagtggctgttgttgtcaggcaaggcgccgcgacgactcatagctcggctatggggaggagcggcaacgcagcgtggcgacaacagacgccgtcaaaatggatcagtatttgtgaggcagggcactttgcccgcatttatatgaccgctcgcctcagcggactttaccctcagcctgggtcagctcttccttgctgaagtcatccacgtcgatcaccttgcgccgcgccgcttcggcgtcacgcagggtctgcgcttcagccggttgcagcacgccggcgtgcagtgccgcatcaatggcatgctcgccggcagcaggtttgacctggccactcttgagcgcggtgtgcagtttcttttgcagcggatggctggcgcccagcaggtcgtaggcatgttgcagggcacccaccgggtcttccgccgattgcgggcggtagcagccggccagcaattcttccagggtcgggtcgcctttggcgcggccgatcacggcggcgacttcggcgtccagcgcatcggacgggccggtatggcgacgcccgaacgggaacacgatcacccgcagcaggcaacccagcaccttgttcgggaagttgctcagcagctcatccagtgcgcgctccgattcgcccaggctttcttccatggcccaggcgaacagcggttccaggtgatccggcgaatccaggtcgtggtaacgcttgagtgcggccgatgccaggtacatatggctcagtacatcacccaggcgtgccgacaggcgttcacgacgtttcaactcgccacccagcagcatcatgctcaggtcggccaacagcgcgaacgcggccgcctggcggttgagtgcgcggaagtaaccctggctcaaacgattgcccggtgccttctcgaaatgcccaacaccgaggttcagcaccagggtgctggcggcgttgctcacggcaaaaccgatgtgttgcatcagcaggctgtcgaattccttcagcgcctggtcatggtcttcgcgaccggccagggccatttccttgagcacgaacgggtggcagcggatcgcgccctggccgaagatcatcaggttgcgcgacaggatattcgcgccttccacggtgatgaagatcggcgcgccttgccagttgcggcccaggtagttgttggggcccatgatgatgcccttgccaccgtgcacgtccatggcgtggctgatgcactcgcggccgcgctcggtgaggtggtacttgaggatcgccgacagcaccgagggtttttcccccaggtccacggcattcgcggtaagcatgcgcgcgctgtccatcagccaggcgttgccgccgatgcgggcgagggcctcctggatgccttcgaaggccgacagtggcacgttgaattgctcacgcacctgggcgtactggccggtgaccaggctggtgaacttggctgcgccggtgccgaccgccggcagggaaatcgaacggcccacagagaggcagttcatcagcatcatccagcccttgccgagcatttcctggccgccgatcaggaattccaggggaatgaacacgtccttgccggagttgggaccgttcatgaacgcggcgcccaggggcaggtggcggcggccgatttccacaccgggggtgtcggtggggatcagcgccaggctgatgcccaggtcttcttcgtcacccagcaggtggtccgggtcatgggccttgaaggccagcccgagcagggtcgcgaccgggccgagggtgatgtagcgtttttcccagttcaggcgtaggccgagggtttcctggccttcccattcacctttgcagatcacgccagtgtcgggcatcgcgccagcatcggagccggccagcgggccagtcaacgcgaagcacgggatatcatcgccacgcgccaggcgcggcaggtaatggttgcgttgttcttcggtgccgtagtgcagcagcagctcggccgggccgagggagttgggcaccatcacggtggaggccaggtcgccgctgcgggtggcgagcttcatcgcgacctgggagtgggcgtaggcagagaagcccttgccgccgtattccttgggaatgatcagggcgaagaaaccgtgggtcttgatgtgttcccaggcggcgggcggcaggtccatggcctggccgatttcccagtcgctgaccatggcgcagagttcttcggtggggccgtcgatgaaggcctgttcttcttcggtcagttggaccttgggataggccagcaacttgtcccagtcagggcgaccgctgaacagctcgccgtcccaccacacggtgccggcgtcgatggcatcgcgctcggtttcggacatcggcggcaggactttctggaaccaattgaacagtggcttggtgaagtattggcggcgcaggtcaggcaacagcaggggcgcggccaccacggcgatcaacacccagaagatcagcaacagccaacccggtgcgtggctccaggcgcccatcgccagcaggtagacggcgaccacgcccagggcgggcaggggggcgacgcggcggtgtgcgaggtaggcaatgctgaccaccagcaccagtatccacaacaacagcatattcaatcctccgtgaaaccaggggcgaaaccaccagggagcttagtcggcatccgaacaagcggggtgattagggtgtaacgagatttggccgattcgtcgttatcgccgtggcagacctgtcgttaaactccaggcttccttcggagataaagctcatggatacgtacctgagtcccagccgcttcatcgatagtgaccaccctgcggtggtggagttcgccgaaaaacatcgcggaacccacgcggctccaagtgaccaggcagtcagtctttactacgccgtgcgtgagacaattcgctacaacccctacaccttcagccgtgatccagacaccttgagtgccagtttcgcgttgagcaccggcgaaagctattgcgtgcccaaggccaccttgctcgcggcctgtgcccggcactgcggcatcccggcgcgcatcggcctggcggatgtacgcaatcatttgtcgacgccgcgcctgatcgccttgctcaagagcgatgtgttcgccatgcacggttacaccgagctttacctgaaccatcgctgggtcaaggccacgcccgcattcaaccagcagctgtgcgatctcttcgatgtgccgccgctggacttcgatggcattcatgacagcgtctttcatgcgttcaaccgccagggcctgcgctcaatggagtatgtggtcgaccatgggcaatttcccgacgtgcccgaggcgtttttcttcgcgcatatccagcagtgttacccccacctgtttgccgaggacatgccgcccctgctgggtgatatgcagagcgatttgagccgcgcgtgaaccggcgtatgctgctgccttcatctagccatgttcatcaacaataaaggcgcggtcatgctgaaaatctggggtcgtaaaaattcatcaaacgtcaggaaggcactgtggtgcgccgaggaactcggcctggactatgaagcaattgatgcgggcggggcttttggcgtggtcgacacgccccagtaccgggcgctgaaccccaacggtcgggtgccgatgatcgaagatggtgactttgtgctgtgggagtccaacaccatcgtgcgctacctctgcgccaagcacgcctccagctggtacccgagcgacctgaaggcccgcgccaacgcggaaaagtggatggactggaccacctccaccttcgccgaaccgttcaagatcgtgttctggggcgtgttgcgcaccccggcggaaaaacagaactgggacaacatccacgccggtcgccaggcctgcatcgatgtgctcaaaaccgttgatgaagccctggccacgcagccgtatctgtcgggcagcgagatcggcatgggcgatatccccttgggcagctttatctacgcctggtttgaaatgcccatcgaacggcctgcaatgccccatctggaggcctggtaccagcgcctgcaacaacgcccggcctaccgcaaagcggtcatgaccgcgttgacttaatacccactattaatacgggtgactgtacttgtgcggcgcgggcaagcaccatgcttgtcatgcgccgccgttgaactacctgggctgcgccctcatctactctttctattcccttctttggtgcgtattccgatatgagttccgctctgtccatccggcagctaaccaaaacctacggcaacggtttccaggccctgagtggtatcgatctggacgttgccgaaggtgacttcttcgccttgctcggccccaacggtgccggcaaatccaccaccatcggtatcctctccaccctggtcaacaagaccagcggctcggtgaatatcttcggccatgacctggacaaatccccggcggcgctcaagcgttccatcggcgtggtgcctcaggaattcaacttcaaccagttcgaaaagaccttcgacatcgtggtgacccaggcgggctactacggcatcccggcgaaaatcgccaaggaacgtgccgagcagtacctgacccagctgggcctgtgggacaagcgcgatgtgccttcgcgttcactctctggtggcatgaagcgtcgcctgatgatcgcccgcgcgctggtgcatgaaccacgcctgctgatcctcgatgagcccaccgcgggcgtggacatcgagctgcgccgctcgatgtggaccttcctcaccgagctgaacgagaagggcatcaccatcatcctcaccacccactacctggaagaggctgagcaactgtgccgcaacatcggcatcatcgaccacggcaccatcgtcgagaacaccagcatgcgcaacctgctgggccagttgcatgtggaaaccttcctgctggacttgaagaacaacctgtcggcgccgccgcaattgctcggctacccgagccgcctggtggacagccataccctggaagtgcaggtggacaaggccatgggcatcaccgcgctgttcacccagttggcgactcagaacattgaagtgctgagcctgcgcaataaaaccaatcgccttgaggagctgttcgtgtccctggtggagaaaaatctgtcgaaggtggcggtatgagttccgaactgcaacccaacctcgtcgcgctgcaaaccatcgtctaccgcgaagtgaagcgctttacccggatctggccgcagaccctgctgccgccggcgatcaccatggttctgtacttcgtgatcttcggtaacctgatcggccggcagatcggcgacatgggtggtttcacttacatggagtacatcgtgccgggcctgatcatgatgtcggtgatcaccaactcctacggcaacgtggtctcgagttttttcggcagcaagttccagcgttccatcgaggaactgatggtgtcgccggtgtcgccccataccatcctgatcggctacaccctgggcggtgtactgcgtggtctgatggtgggcgtgatcgtgacgctgctgtcgctgttcttcacccacctgcaggtgcatcaccttggggtcaccattttggtggtggtactgacggcgacgatcttctcgctgctgggctttatcaacgcggtgtttgcacgcaacttcgatgatatttcgatcatcccgaccttcgtgctcacgccgctgacctacctgggcggggtgttctactccatcaccttgctgccgccgttctggcagaccgtgtcgctggccaacccggtgctgcacatggttaacgccttccgctacggcattttgggtgtgtcggatatcaagatcagcgtggcgatcacgttcatgttggtggcgaccgtggtgctgtacatcggttgtgcgcgtttgctggtgagtgggcgtgggatgcgtacctgactcaacgggtgtacgcgggcaaaaatgtgggaggggcggtgcgacgactcgacttgcccccgatagcgttctgtcagtcattcatgcactgactgatccactgctatcgggggcaagccccctcccacatttgtattggcgtaacgtcaggaattgagtgccagttcgatcagcccgtgcagctcttccaccgtcagtggcgcggtcgagaacagaatgcgaaacaccgtcggcgctgcgatcaggttgatcagatggtccacgctcggtggcatctcgtccggatagcgatcgacaatcgcctgaaactgcccgctcagaatgctcacgcaataccccggcgtgatcatgcactgcaggtcgcgcatcatgttgcggcccggttccgaactcatttcatccaggtattgctcggcccaggcctgcaggtcgccacgcaggctgccggtgttggccggctcgctgtcggggcgcatgcgcgccagcgccacgtccgccaatagcacggacagatcgccccagcgccggtaaatggtggagggcgtgacgcccgcacgcgccgcaatcatcggcacggtaacgctggagcgctcatgggcttccagcagttcgcgcacagcgttgtgcactgattcttggacccgggcactgcggccccccgggcgaaggccttctttaatcgccatgctggtgaccttaacacaaagaatttgctttaagcgctggccggtagcacactctgcaaaagcaaaatattagctttagcggagcgtgcgtatgtccagtcctgtttcccatcgttccagcctggtgttccttgcggtcactttgctgacgtttctcgcggcctccagtgcgccaacgccgttgtaccacctgtatcaggagggcctgcatttttcggcaggcatgctcacgatgatcttcggggtctatgccttgagcctgctggcggcgctgttgaccgtcggctcattgtcggaccacctggggcgcaagccggtgatttttgctgcgctgcttctgaatatgttggcgatgttgctgtttatcaatgaaggcagcgtggcctggttgattgccgcccgtaccctgcaagggtttgccaccggcatggccactgccgtgctgggtgcagcattgctcgacaccgaccgccagcaaggcccactggtcaacagcgtggcaccgcttttgggcatggcctgcggggcgatgggcagcagtctgctggtggagttcgcgccattgccgacccagttgatctactggacgctgctggccttgatgctgttgcaggccctctacgtatggcgtttgccggagacagtgagccgcatccccggcgcactggcgtcgctgcgcccgacgttgcacgtaccgccccaggcgcgccgggcgttgtggctgtcgttgccggtggatatcgccgtctgggcaatgggcgggttctatttatcccttgcgccatcgttggtgcgtgcggccaccggctccacctccaacctgatcggtggcggcctggtggccgtgctgaccctgagcggcgcgctgatgatctttaccctgcgcaatcgtgcggccgacaaggtgctgcgtctgggcgccggcttgctcgccatcggcgtgacgctgatcctcaccgccgtgcacagcgccagcctgccactgttcttcatcgccacccttatcgccggcagcggctttggtgcgggctttctcggcgccttgcgcagtgtggtgccactggccttgccccatgaacgtgccgggctgatgtcggcgttctatgtgctgagctacctggcgttctgcttgccttcattgctggcgggcaacctgattcgcagctttggcctgatcgccaccaccgacggctacggcgcagtcctcatcctgctggccctcggtgcgttggttgcgttgctgctgcaggattcggcgcgggtgagggcgacgaccggcggctgatgggtaataatcggtgcccgtattcgcctgatcgagattcaagtatgaagatcatccgcagcaaggacttcaccggcagtcgcgcttgggaggcgctggatattgccaacatgaatggcatcaccacgcgcctgcactggaccgaccagccgtaccgctggcacatcaatgacggtgaagaggtgtttgtggtgctggatggtcgcgtgcagatgcactaccgcgacaatggcttcgaacaggtggcggagctggaggtcggcgacatcttctacgccagtgtcggtaccgagcacgtggcccatccccaaggcccggcgcgcattctggtgatcgaatgcgaaggcagcgtttgacgctatatcggcaaaacagataacagttagagatattacccgttatatagatattcgatcaggttctatgatggcctcaacctcatacgagaaagaggagcgtcatcatgccctgctcgaataccctcagctacaaacccttcagtcacctggcccgtccacgggaagtgattcgccagttcacccccaactggtttgccgcgaccatgggcaccggcgtgctggcgctggccctggcgcaactgccggtcaacctgccaggtttgcacgccatcgccgaagcgctgtggttttttaccatcggcctgtttgtgttgttcagcgtgctgtatgcggcccgttgggtgatgttcttccacgaggcgcggcggatcttcgggcactccacggtgtcgatgttcttcggcaccatccccatgggccttgcgacgattctcaatggcttgctgctgttcgggttgccgcgttggggcagcgatgtgataccgctggccgaggccttgtggtggctggacgtggccatggccctggcctgtggtgtgctcatcccgttcatgatgttcacccgccaggaacacagcatcgaccagatgaccgccgtgtggctgttgcccgtggtcgccgccgaagtcgccgccgccagcggtggcctgctggcaccgcacctggcagacgcgcattcgcaactggtgatgctggtgaccagctacgtgctgtgggcgttttcgctgccggtggcgttcagcatcctgaccatcctgatgctgcgcatggcgttgcacaaactgccccacgccaatatggccgcgtcgagctggctggccctggggcctatcggcaccggtgcactgggcatgttgctgctgggcggcgatgcgccggcgatcttcgcggccaatggcttgccgggcgtgggtgacatggccaacggcctggggctggtggccggtatcacgctgtggggcttcggcctgtggtggatgctgatcgccgtgttgatcaccttgcgctacttgcgcgcgggcatcccgttcaacctgggctggtggggcttcacctttccgttgggggtgtatgcgctggccactttgaagttggcgagcctgttgcacctgggtttcttcagcgtattcggcagtgtgttggtggtggcgttggcgctgatgtggctgatcgttgccaggcgcacggtgcagggcgcctataaaggtgagctttttgtttcgccatgcattgcgggactagggaataagtaagcggagttaggtaaagtcgtggcctgataactattaggccacgcaggaacacggacgatgagccacccctcgcaattcaccttgctgcgcacacggcgtttcctgccgtttttcatcacccagttgctgggcgcgttcaacgacaacatcttcaagcaatcgctgatcctcgccattctctacaagctcaccatcgacggcgaccgttccatctgggtcaacctctgtgccttgctgtttatcctgccattctttctgttctcggcgctggccgggcagtttggcgagaaattcaacaaggacgcgttgatccgcgcgatcaagatcggcgagatcgtgatcatggcggtgggtgccaccggcttcctgaccaaccatctggaattgatgctgctggcactgtttgccatgggcacccactcggcgctgttcgggccggtgaagtattcgatcatgccccaggccctgcatgaagatgagctggtgggcggcaacggcctggtggaaatgggcacgttcctggcgatcctggccggcaccattggcgccgggatcatgatgtcgtccacccattacgcgccggtggtggccgtggcgattgttggcgtggcggtgttgggttacctggccagtcgcagtattccgcgggcggcggcgtcgaccccggggctgcgcctgaactggaatatcttcagcgagtcctgggccaccctgcgcctgggcctggggcagacgccggccgtgtcgcgttccattgtcggtaactcgtggttctggtttgtcggtgcgatctacctcacgcagatcccggcctacgccaaggaatggttgtacggcgacgagaccgtggtgacgttgatcctcaccgtgttctcggtcggcatcgcactgggctcgatgctttgcgaaaagctgtccgggcgcaaggtggaaatcggcctggtgccgttcggttcattcggcctgaccgtattcggcctgttgctgtggtggcactccggcggcttcccacagaacgtgcaggccaacgactggctcgccgtgctcagctatggccaggcctggtgggtgttgttggatatccttggcctgggtgtcttcggcggcttctatatcgtgccgctgtatgcgttgatccagtcgcgcaccgccgagaacgaacgtgcgcgcgtcatcgcggccaacaacattctcaatgcgctgttcatggtggtctcggcgatcgtatcgatcctgctgctgagcgtggccaagctgtcgattcccgagctgttcctggtggtgtcgttgctcaacgtcgcggtcaacgcctacatcttcaagatcgtccccgagttcaccatgcgtttcatgatctggctgctcagccattccatgtaccgtgtggagcaccgcaacctggaggcgattccggatgaaggcgcggcgttgctggtgtgcaaccatgtgtcgtttgtcgatgcgctgttgatcggcggcgcggtgcgtcggccgattcgctttgtcacgtactacaagatctaccgcttgccggtgctcaactttatcttccgtaccgccggggcgattccgattgcggggcgtcacgaagatattcagatctatgaaaaggccttcacacgcattgcgcagtacctgaaggaaggggaattggtgtgcatcttccccgaaggcaagttgaccgccgatggcgagatgaacgaattccgcggtggcgtgacgcgcattctggaagagacggcggtgccggtgattccgatggcgttgcaggggttgtgggggagtttcttcagccgcgatccgaacaaggggttctttcatcggatctggtcgcgggtggtgttggtggcgggtggcccggtggaggagccgacgcctgcgaggttgcaggaggtggtagctgggttgcgggggagtgtcaggtagttttgggtttggctgtactggcctcatcgggggcaagccccctcccacattttgactgtgttcacaaatcaaaggtgggagggggcttgctcccgatgacggtagtggctcaggtgctgatcttgaggccaatcagcccacagatgatcaacgccacactcgtcagccggaacaacgccatggactcgccaaacaggataatccccgcaatcacggtgcccacagcccccacgccggtccagatcgcataggcggtgcccagcggcagttccttcatggccagccccagcagaccgaggctgatggccatggcagcaatcgtcaaggcggtgggcagcggcttgctgaaaccgtcggtgtacttcaggccgacggcccagccgacttcgaataacccggcaaaaaacagaatgatccaggacatgatgacctcctaacgataggtggggtcgtccccggattaggcgcttgaagcgtcgcgaggtcgtccccgcgaagctcggtagagtgccgaaaagtacccggctgatcaagtttgcggcgtgttctccagggcgcgacggtcttccttctcgctcatgcggcgaaagtaggtcgacagcaatgccccggaaatattgtgccagacgctgaacagtgcactcggcaccgccgccaacggtgaaaagtgcgcactggccagcgcggcacccagcccggagttctgcatgcccacttccaacgccagcgacttgcgctgtgccaaaggcagcttgaacacgcggccggtgaagtagcccagcaggtagccgaaactgttgtgcagcatcaccacggccatgatcaacaggcccgattcggcgatcttcgcctgactggcggcaaccaccgccgcgacgataatcacgatgctcaccaccgacaccagtggcaatacatccaccgcatggcggacccgatcaccgagcacgcgttgcgccagtacgccgagcacgatcggcaacagcaccacctgcaggatcgaccagaacaactccatgaacgacaccggcagccaggccgatgccagcagccagatcagcgccggggtgagcagtggggcgaggagggtggtgacggcggcgatggccaccgacaacgccaggtcaccgcgggccagccaggtcatcacgttggacgacgtgccgctcgggcagcaaccgaccaggatcacgccgacggcaatttccggcggcaggtggaaggcctggcacagcagccacgccacacccggcatgatcacaaagtgcgcgaccacgcccagggccacgcgccagggatggcgggcgacctcggcgaagtcgtcgagtttgagggtcagccccatgccgaacatcaccaggcccagcaggggcacgatggcgcttttcaggccgatgaaccagcccggttccaggaaggcgacgacggcgaaaatcaacacccaataggcgaaggtgttgccgacgaagcggctcaaggcggcgagtgcgcgcatggggaggtcctttgttgttggattcgatcaaatgtgggagggggcttgcccccgattgcagtctgtcagtcaaaggtgttttaactgacagaacgctatcgggggcaagccccctcccacattttgatgtcacatggcttagatgccctgcggggtttcttcgccaccgagtgcttcaaccagcgccgggatgaaatcgccgaacgtcagcatcatcagggtgaagctcgcgtccagttggcccagggcttcttcaccgccgtcctgttccgcctggtcttgcagcaggtcttcgaacttcaggcgcttgaccgtcatcttgtcgtcgagcatgaaggacagcttgtcctgccaggccagggacagttgggtcacaactttgccggtggtcaggtgcagctggatctcttcgccggtcaggtcctggcgcttgcagcgcacgatgccgccgtcttcgtgggtgtcgcgcagttcgcattcgtcgaggacgaagaagtcatcggccggcttctgggtggtgacccagtcggtcatgatcgcggttggcgcggtttttaccgtgagcgggcgaaccggcagggtgccgatcacttcacgcagggtcgacagcaggtcttcggcgcgtttcgggctggcggagttgaccaggatcagcccctgtttcggcgcgatggcagcgaaggtcgacgaacgacggataaaggcgcggggcaggaacgcctggatgatttcatccttgatctggtcgcgttccttcttgtagaccttgcgcatttgctcggcctcgatctcttcgactttctctttaagtgcgtcacgcaccacgctgcccggcaggatgcgttcttccttgcgcgcggcgatcagcaggaagtcaccgctgacgtgaaccaggggagcgtcttcacctttaccaaacggcgcgacgaaaccataagtggtcaactcctggctggcacaagggcgcgccagcttggtggccatggccgcttccaacgcctcggcatcaacaggcagatcttgggtcaggcgatagataagcaggttcttgaaccacatggggtgagtctctcctttatacaaaggggggcattattctcttgataacgtcccaggccaaccctgcctaagccattggaagctatcaaaaaaaagatttaagaaagtgcttgccagacttaaggtcgctccgtagaattcgcgccacaccgaaacgaagggtgattagctcagctgggagagcgtctgccttacaagcagaatgtcggcggttcgatcccgtcatcacccaccattcgcttcatgtgttacgcgcagcggtagttcagtcggttagaataccggcctgtcacgccgggggtcgcgggttcgagtcccgtccgctgcgccatattcggtcacctggaacactgaacgccaggtaaccacaggaagcccgctcatcgagcgggctttttgctgtccagggtttgtaaaaccgaaaaaaacgccgccgatcatttccgatgatcggcggcgttttttattgggtaatcagaaatcccagcgggtgctgaccatgaagttgcctgcgccaggtcggcggcattctggcggtagcccagtttgcgtcgcagcttggtgagcagccagccatgatgctcgctgtagagctgggtaatttcccgttggaatggcggttcacccacagacataggcgtggctcaggcgttattgagaatagtttttaattgtgcggtctagccgccggtaaacgcaatagactcgcgtttgaggacacagaagcccgtttttgctgggttttgtcattggcgagaaaatatttcaaataaagtgcatttaaatcaagacattgcggatttttggtgtatgatgccgcccacaccgaaagtgaagggtgattagctcagctgggagagcgtctgccttacaagcagaatgtcggcggttcgatcccgtcatcacccaccattcgcttcaagtgttatgcgcagcggtagttcagtcggttagaataccggcctgtcacgccgggggtcgcgggttcgagtcccgtccgctgcgccatattcggtcacctggaacgctgaacgccaggtcgccctaagaagcccgctcattgagcgggctttttttcgtccgcgatttgacctcccttgccttgacgttgtgcactgcctcttcgccctgaactgtgctggtgcgtcatgacgtgagggaatacccccatgcacattggtcgattgcaccccttgccgcttaaacgtttatctatagccacgcgaagacttccaggcgagtcatcggcagcaggacgctgcggtgcccgctctccaacacaaaaaatagtctgcaaggggaatggctctagatgaaatatccactgcgtccgttggtgttctggccaactttcctgatcctgctggcggcggtgatcgccagctacgttgacctgaatgcgttcctggcgatcagcaaacagctcaacaacctgatcctgaaaaacttttcctggctgttcagcgccggctcgtttgccatggtcgtgctgaccgccatcgtctacttctccgcgctgggcaaggtgcgtatcggcggtgaagacgcgcaaccgttgctgagtaaatggcgctggttcatggtggcactgtgcaccaccctcgcggtaggcgtgctgttctggaccaccgccgaaccgctctaccacctgtacggcccgcccaccagcttgccaatcgaggccggcagcgcggcggcgaagagcttcgccatgtcgacgatgttcctgcactggaccatcaccccctacgcgatctacctggtgccctcgctggtgtttgccctggtgttctacaaccgccgcagcaatttttccatcggcgccatgcttgaaccgttgctcggcgaagcacgggtccggcgctatgccgggctgatcgacaccctggcgatgttcgccctggtcgctggtatggcctcgtccctgggcaccggcgcgctgaccctggctggtggcctggcccagtacatcggcggtgaaaccacgccgttccgcctggccatcatcattgcaatcatcgtcatcacctttgtcgcctcggccgccagtggcctgcaaaaaggcattgtgatgctgtcttcgttcaatacctggatcatgctggccctggggctgttcgtgctgttgtgcgggccgaccttgtacatgttcagcctcggcgtcgaatccctcggcatctacctcgacaccttcttcagccgcagcctgttcaccggcgctgccagtggcgacacctggccgcacagttggacggtgttctactggtcggtgtggtttgcctgggcgccggtgagtgcgctgttcctcggcaagatcggccggggctataccgtgcgcgaattcatccacatcaacatgctctacccggcgttgttcacggccgtgtggatctgcattttctccggcaccagcctgtatttcgatgcgctgggcgacggcagcctcaaccgtgtgctcaacgagcagggcgtggagcacgtgctgtaccagatgttccagcaattgccggccagcggcctgatgatcgcgttcctgctgttcgtggcgttcatctcctttgtcaccgcggcagactccagcaccgacgtgatcgccaacctgtgcagcaagggcgtgactgccgattccgatctcgacggcaacccgctgttgaagattgtctggggcctgatcatcggcacggtgtcgtgggtgatggtcgcgtttgtcggcgtggacggggtgaagatgctctctaacctcggcggtttgccgggcatgatcctggtgttgctggccagtacctcactgatcttctggttgaaaaaccccgcattgctggatgtgaaacgccttcagcggacacctgagacggaactgcgtggcgccagcccgctgccggatttcgcccgctgatcgattgaaccgctgttggagttactgatggaaatcgtcactgagtttacttacaccgtgcgcgagatcgagcactgcctgatccctttgaaggacggcacccaactggccgcccgcatctggctgccgcaagtcgccgacccgcagaccttcccggcgatcctggaatacctgccgtaccgcaagcgcgatggcaccgccgtgcgtgatgcgctgacccacccgtggatggcggggcaaggctatgtgtgcgtgcgcgtcgacatgcgtggcaatggtgaatcccagggcctgatggccgatgaatacctgttgcaggaacaggaggacgccctcgaagtgatcgactggctgtgccggcagccatggtgcgacggcaatgtcggcatgatgggcatctcctggggaggcttcaacggcctgcaagtcgcggcacgccagcccgaggcgctgaaagcgatcatcacgctgtgttccaccgatgaccgctttgccgatgacatccactacaagggcggcaacctgctgatggagaactttggttgggccgccaccatgctcaacttcagcgcggcggtgcctgaccctttgctggtcggcgatgactggaaagatctctggcaacaacgcctggacgccatgccgttgctcgccgaaacctggctgcagcaccagacccgcgatgactactggcgccatggctcggtgtgcgaggactatgcgcagatcaaggccgccgtgtatgcggtcggcggttggggcgacgcctaccgcaataccgtctcgcgcttgatggaaaacctgccagggccgaagaaggccatgatcggcccgtggattcacaaatacccgcacttcgccgtgcccaatccagccatcggctttctgcaggaggccaagcgttggtgggatcactggctcaaaggtgtggataacggcgtgatggatgacgcggcgtgcaccttttacctacaggatattctgcccccgaggggcagttatgccgaacggccgggcatctgggtacagaccgccggctggccggacccacaggtgcaatggactgatttcagcctgggcgaacatggcctgactcctggggcacagcccttggtcacaccgcgtagcatttgctcgccgctgaccacgggcctgcaccagggcgaatactgcgccatctggtttggccccgatggcccgacggatcagcgccgcgatgatgcccactcgctgtgcttcgattcccaagcgctgaccgagccgttggcgttgttgggcgatgcccgtctcacgctgcgcctggcgagtgacacggcctgcggccaattggtcgccaggctgaatgccgtggcaccggacgggcaggtgacgcagatcagttatggcgtgctcaatctcacgctgcgtgaagacttctcttgcgtaacacctgtagtcccgggggaaccgatggaggtacatctaaacctcgaccacatcggcctgcgcttgccggccggttaccgcctgcgtctggccctgagcaccgccagtttcccgttgctgtggccaagccgcgagctgacaaccctgaccttgctggcgaccctgcaaagcctgcaattgccggtgttcaccggcgctgcggtggactgcccgttcgaggcgccgcaatcggcgacgccagtggcgatggaagtcctacgcgccgctgcgccgaaacgcaccctgatcgaagatgtgggcagtggcgaagtctgcgtgaagatcgaagacgacctgggtgcggtgcgttttaccgatcacggcttgtcggtcgaccagcgttgcaccgagcaataccgcaccttgccttgggacccgctgtcgacgcgggcggatatcgaatggcactaccgcgtcggccgtgaccagtgggccgtggaggtggacagccacttgagcgtgcatgccgatgccgagtggttctacatcgaagcggagcagacagcctgggaaaacggccagttggaacatcgtcggcaatggagcaagcgcgtggcgagggtcgcgctgtaagcaggcaactggcaggatgcttgccatcgtgatcgctgcgggcctggggcaacccgggctcgtcattgccaatggaactgctcatgtcgcgtcgaaacgtcgatcttccaccgctcaactgcttgcagacgttcgaagcggctgcccgccatttgagctttacccaggcggctaatgaactgaacctgacccagagcgcggtcagccgtcaggtcaagcgcctcgaagaggacttggcccgcccattgttttatcgcctggcccagggcctgagcctgacgcccgccggtgtgcgttacttccgcaccatccagcgcctgctgcgcgagttggaccgcgagtccgccgagttgcgccggcgtggcgccgaccgccagttgaccctggccagcacgcccactatcagcacgatctggctcgccggcctgttgccacaattccagcgcgaacacccggacctggatatccgcatcctgtgcagcgaaagccccagccatctggacgtcagtgaatatgacctgggcctgttctatcacctggatgaactggccgcgccccacggcctcgagctctcgccggtgttcgacagcgagcaggtcatcaccgtgtgcagcccggcctacctcgaacaccacggcccgattcgcgatatacaccatttgctgcacgctcacaccttgctgatcgtggaggatcactaccacgattggctgacctgggccgactggttcaccgacgccggtgccgactattacaccccgcgccacgcgttgcggaccaacagctatcaactgctgatgcagtcggcggtgatggggcacggcatcgcactgggctggaagagtctgttggaggacgacctggcttccgggcgcctgcaaatggccttgccccataccatgcacagccgcggccgcctgcatctgatgcaaccccaccaccgcaacccaccgtcggccgcgcgcagttttcgccaatggttactggccaagaccgccgcggcggagtcagctggctgaaggtcaacgctggccggtttttttctttcggttctgccgcgtcgccaagtgctcgaaacaaaaagacgcggtgccgaacaccgcaatcagggtgagtacgagcatgccgagggttgagctttccacggtgttttcctacgggtgatggagtaggtcttcacggtagaggcggggagagagtggctcaatagacccgacgcaatccttacgccgccgggtccattgttacgcactttttacggggcgttgcggctgtggcggtaatcgctgaccgcttcatacaccgccttgcgcaagcggttgatgccgccgacagggcgatgttccgctacgccgaaccaggggttgaacgactggttgtcgcacgccaggttctgctcgggggtatcgaagtcctgcgccgggatacgcaccttggccacggtttcgtagggcgcatcgctttccttccactcgatgctggtgtcttcgatcggcatgaatttctgcgggttctgccgctggatctgcagcacgaaacacgcaggcacgcgatcggtggacaactgctggctcaaggcgctgcgcagaaaattcggcaggtcctggttctgtttgggcagtgcatactccgggcaactctgcgggtctggggccacgcggaacttggcgttggccgtgccgaacttgtagggcgagaccgaaaagtaggtggtctgtgtcggactcgccggtgccggcgccagggtcgccagggcgatgaacaagtgacgcacctgccaggtgcgcgggtcgaccttggggaagaacgccaggactttcttgccatccgcctgggcgccgatgttctgtgcgtactccgccacatcactgacaaagaagttcgggtggctgaacatcacgaagtcctgttcggtgcgggtctgctggtcggccagcagttgcttgcccggcacgtccaacagcttgagggccatgccccgtgcatcgcggatgctgtcgaactgcgggtacgcgttgccgttggacagccgcatcagcgcctgccaggtcttgcccggctcggcgaacacgccctggcgcagcgccggatcgaggtcggccattacgctgacttcggccttcacgcagccgtgggccttggcgtgggcgtcgcgcaggtaacgcgtgccttcgcggtgttggtcgacgatgcgcaccgccgtctggatgattccttgggtcatcgccgcttcgccgggcggaatctgttcgtttggcgacaccggcccgctgtgctgccaggcataccaggcggtggcacccagccagccgagcaggccgaggcccaccagccaaagcaaggtcttgcccagaaacgcaccgatgcgcagccacaggcgggcgagcagggaaggtcggtcgtagggggatcgaatcatcatggcagttgttgctccagcgggccgcccagcactttgaggtattccagcagcgcccagcgttcctgcggtagcaggccacggccgatcacgcccttgccacgactgccggcacggaattcatggccgctgttgtggttgccggtgattttggtatcgaacaggaacgcattcttgaacgccgccgtctcgaaaccgagatgacgcgggtcgtagttaaaggtgcctttatagaaggtggtgctgcgctcatcctggggcgagagtaactgatagatcgtcggcaccgagccgttgtgcaggaacggcggcgtagcccacacgccggcgagcggccgtgccttgtaggcgcgcagctcgcgcacgccgatgggcaagccgtatccatccaggcgcggacgctcggccggggtcacgccggcggcacggtaggcgtgctcttcgacaaaggcggtgacgtaggcgaggcccttggccacggacatttttttcaggtccagcggttcggtcggcgtcgggtgcagctcgacgttgagtttggccagttccgccgggtcccattgcagggcgctgaggtcgtagcgctggtcggcaatgttgctggcggtgccagggtcagtgccgatgtagtccaccggcagcattttgagcgcctgcaccgggcggccgttttcctgggtgacactgggcacatggcagccggcgcagttttcggtgaacagtgcacggccctgggcggcgaggggcttgtcgatggcgccgaacaggtcctcgggccaggtcggcggcttgaggcgttgcagggtttcttcgatcaggttgaggtcacgcacgcggacgctggacgggtaacgcgcatcgccctggagcggctggccggcggcatcgaaaaagctcagcgtggcgccgacacccagggcctcaccgatattgcgcgccatgggttgctgggccgagccgttccattgcacccagtcgaaggtccagatatcccacaactgcgggtagtccaccgacgcgttggcgacgcgataattgtccggggaaatcgcatcgccaaagctggcgttggcgatacggccaaaggcgtcggtgcggcccgggccttcttcggtgggatagaggccgcgatgagtgtcgttccaggccactttgaggaactggttcagcgattgcttgaagtcctggcgcagttgtttgtgctcggcgtcgtagcgatcaccgagcacttggcgggcaaaacgctcgaacttccacgggttgtagtaggtggcggcgaggctggcgaccaacgcctggccgaaactgccgccgcgcagggtcggaacgctggagggcagtacatgctgggccgaaccgccgtcgatgcgcagggcctggcctttgaagtgcagctcgccggtatggcaggcggcgcaggtgatatccaggtattcaacgttgctgccggcgtttttatgccgggcgaaacccactggcaagttgccggggttctgcgttgtgggcacctgcttggggtcgaccaggaaaccgaagcgtgccaggtagtcgggcgtggcaaaacgtcgctcggaaaacggcagttcgagggcggtgaaccagtcgtagtgcaggccttttacttgcgtgccctggggcgtgaagtaataggtctggcggtcggtggcactccattggtcctggtagtgcacctgctccacaggcacgtagtccggcagcttggggttgatggtgtaatagagcaccacgcccagcaccagggccagcagggtgaatatcaggagtaaaacacgggtaaaaatgcgcaagatggctatccttgtctcggccttgtcgagttgtcgcgttgttatgccactacgccacaggggcggcaagtggccatgagcctggtagtaggcggtcccacgatccgtcgcgggcctgcatcatgaatgaaaatgcttttaaacacgtgaacttatcggaagtttcctgctcacatgccggtagccattggtcgtggccgcctgataagctcgcgactttattcgaatgcccttttggcgcatgaacaaggaaatagcatgaaacagcatcggttggcggcggcggtggccctggttagcctggtacttgcgggttgtgattcgcagaccagcgtagagctgaaaaccccggcgcagaaagcttcctacggtatcggcctgaacatgggcaagagccttgcccaagaaggcatggatgacctggactccaaagctgtagcccagggcatcgaagatgccgttggcaagaaagagcagaagctcaaagacgacgaactggttgaagcgtttgccgcactgcagaagcgtgctgaagaacgcatgaccaagatgagcgaagagtcggcagccgccggcaagaaattcctcgaagacaacgccaagaaggacggcgtcgtcaccaccgcttccggtctgcagtacaagatcgtgaagaaggccgatggcgcccagcccaagccaaccgacgtggtgactgttcactacaccggcaagctcaccaacggcaccacctttgacagctccgtggatcgcggcagcccgattgacctgccggtcagcggtgtgatcccgggttgggtcgaaggcctgcaactgatgcacgtgggcgagaaggtcgagttgtacattccttccgacctggcctacggcgcacagagcccgagcccggcgattccagccaactccgtgctggtcttcgacctggagctgctggccatcaaggacccagccaaggctgacgcgcctgctgcaccagccgccaagaagtaatcggcgcctgaacacacaacgccccgtctcgacggggcgttgttgtttctggggccagcaggcacctgaatgtgggagggggcttgcccccgattgcggtagatcagtcacttatgctgtggctgaaccattgccatcgggggcaagccccctcccacattagagcttggcgaattcaaacgaacgtctgcagccggttacagtctgatataagactcgagtacgggtagccgcacatcaacgccaagtcaatgaaatcttgggttttttttcagtgcgcaaaaaacgcccgatctgactgcaagccttgtactacgtggctttcagcccggaaaataggctctgttcacaaggttatccacaatttgtgtggataaccttttatgtcgcctggaactggagtgacgaatgaaaccacccttcaatttcacccgtttcctgcccatggccgcacgtctcctgggtcgcgggcgcttgccgacgctgttgtttgcggtcgccgccaaaggctcgagccaaggcaaccgcctgggcaagctcaaggatgatctcaagttgctccaggccctgtgcctggcttactggcgcggtgagtaccgggccatcagccccaaggcgctgatctcggtggtggcggggctgatgtatttcctcagcccgattgatgcgatccccgactttatcccggtgttcggcatgctcgatgacattgctgtgctggcatgggtcatgaagaccctggacggtgaactgagcgcgtttcgcgcctggcgagaggcccagcgcccggaaaagctcgccgtggttgagcgcctgcctgcgacgccctcgctgctggcccaggaaaacccgcaaaaaaacccatgacttggctatcccctgcgacctttgtggctgttaggattacactcctaaggaaagagcttacttagtaagtgcagttatcctacggggcagtcatggatattcagataatttcacgtaatggcgaacccgaatatgcggtgttgccatgggatcagtaccaggcgctgctaaaagctgccggtcagcaacagactacgctacctccttcctcatcgactgcccaagccgcccctgcacaggacctgcgcccgctcgccgacctgcgcggcttgcgcgaagccaagggcctggcgatcgagaccctggcccgcaccgtgggcatcagcccgtcatatcttggattgattgaaagtggtgaacgccagccggatgccgcgatccgccgcagcctggcctgggaattgggcgttgcaggttggagggatgaatcttgagcctacgtatcagccgtcaacactgggatggattactcaacgaactggaccaggcgcgccgccagcgccatttgctgacttaccgtgcgctgctggagcgcctgcaatttcccaccccggccatgcagaccctggccgccgccttggaacacctggcggcgctggacgccaaggccgagcagccattgcgcagctcgctggtgatcagccagggtgccagccgtttgccgcgtaccggtttcttcgagtgtgtggagcgcctggggcgtttcagcgggccgtccgatggcgtggccgccgcctcctggcacgcgtcggaagtggtgcgggtgtttgaatacgagtatcccgagtccgccgaggcctaaagcgcctgggagagtgcgtccatgctgtcgatcacatggatgctgtagccggccatatccttggcatggtgcttggcctgcgacgccaactccgccaactggctggcatcgagttgtccacaggcctgtggatataaatgcaccacgccgatggacagcgacagcagtgcaaactcctggcgcacgccctggcggttcaacgccacgaaacagccggcctccagatgctcggcgcggtagaagcgccggcattgggtatggaagtcatccagcagttggttgagccgcttgcgccagtcctgcgggccgagcaccagcaaaaagtcatcgccgccgatatgcccgacaaagtcgcggctgggatcgacgcggtcgttcaggcactgcgccaggcacagcaacacctcatcgccacgcccatagccgtagatatcgttgaacggcttgaagctgtcgatatccacgtaacagatcaccgactcgcgctgttgttgcagcaggcgtgtgaggcactgctggatcggcacgttgccgggcagcagggtcagtggattggcgtagcgcgcctgctggatcttcagctcggtgatcagcttgagcacatcgatcacccggcccaggcccaggtaatcgccattgagggtgatgatgaaatcttcttcgatgcgttgccgcgcacggctggtgagcaggcggctgacctgttgcagcgactggctcaactccaccgcgaggaagtcggtgctcatcaagcggctgatgggcttgcgcgcaaacaggtcggtggcgaacggcttgagcagcgcatccgacagcgaatgccggtgcacgataccgaccgggtggccacggccgtccagcactgccagggagttgaggttggcctggcggcggaacgcttcgagcacctgggcagtggcggtgtcctggtccactgccggctgttcgctgagcagggcgctgaggtcgctgccttcctcgttcagcgccacgttggcgctgtcgggcttgggcagcatcagccgcgcttcctgcggcggttgctcctgtggacggcacagcaggtagccttggaccaggtctacgcccatctctgtcagcaccgccaactcttcgggcaactcgatgccttcggcgatcacctgggcgcgtgacgccttggcgatctgcaggatggagccgacaaactcgcgcttgagcgcatcctgatggatgccgtcgataaagtgtcggtcgatcttcacgtaatccgggcgcagctccgaccacaagcgcaggctggaatagccggcaccgaggtcatccagggcaatcgagaaccccatgttgcggtagtggtgcagggcggtttgcaacaggtcgatatcgttggtgggggtttgttcggtgagctcgatcaccacctggctcggtggaatgccgtagtcgtgcagcagttgcagggtgcgccccggttggtgcgcggtttccatcagcgattgcggcgagacgttgaggaacagcttgcccggcagcttctgctcgctgaagcgtcgacacgcgctttcgcggcaggccatttccagttcgctgaggcgtccggcctggccggccacggagaacaaggcgacgggagagtgcagcgggctgttggacgggccgcggctgagggcttcgtagccgagaatacgccgttcagacaggcaaatgatcggttggaacaggctgtgcaaactgccttgagccaggatagagcccagtgcattcagctgttcggtcatggtcatggcgatctcgatcgaaaaaaaaggaccgcaggcttgaaacctgcggtccttcatttcacgacagaatgatgtctatatgatgacactccagggagcgatcacattaaatcgccatcatttactgcttggccacctgcttgctgatcttcaggtagtccagcaggatccggccggtctcggccaggtaagcgtcgtcttccggcttggttttttccgcttcggccggcagcgcgtcttcgtcttctttcttcagctccttgagtggatcctcacccttggccttgcggcggatgttttccagtacgagttgcttgttttcgatgtcggcgtgctgcgcgcggcggtccacttcgttgaggctgacggttttttcttccatcagcttcttggccagggccagcttgtcgcggatgaacacgaactcggcatccttggcggagcgggtgtcgtggtcagctttcaactgtgccaggaacggtttgaacggatccgacgccggcttgatcgcagggcggatggtgtcccacggcatggcttccggcagggcgctttcgccgatttccttggtgtcgatgatcgacgggaaatcgatgtccggcagtacgccctggtgctgggtgctctgtccggaaacccggtagaacttggccagggtcagtttcagctcgccatggttcagcggctggatggtctgcacggtgcccttgccgaaggtctggccaccgatgatcaaggcgcggtggtagtcctgcatggcaccggcaaaaatctccgaagccgaggccgagaggcggttgaccagcaaggccatcgggcctttgtagaaggcgcccgggttctcgtcttccagcacgtcgacacggccgtcagcgttgcggaccaacacggtcgggcctttgtcgataaacaggctggtcagctcggtcgcttcctgcagggagccgccgccgttgttgcgcaggtcgatgaccacgccgtcgactttttccttctgcagttcggtgaggattttcttcacgtcgcgggtggtggacttgtagtccgggtcgccggcacggaaggccttgaagtccaggtagaaggccgggatttcaatcacgcccagcttgtagtccttgccatcctgcttgaggttgaggactttcttctgcacggcctggtcttcgagcttcaccgcttcacgggtgatggacacgatcttgctggtctggtcgttcggtgcattggtgtgcggaatcacttccaggcgcaccacgctgcctttcggcccacggatcagcttgaccacttcgtccaggcgccagccgaccacgtcgaccatctctttgtcgccctgggccacgccgatgatcttgtcggccggagcgacctgcttggtcttgtcggccgggcctgccggtaccaggcgcacgatcttgacctggtcattgtcgctttgcaggacggcaccgatgccttccagcgacagactcatgttgatatcaaaattttctgcgttatctggcgacagataattggtgtgcgggtcgtaggacatcgcgaaggtgttgatgtaggcctggaagatatcttcggcacgggtctggtccaggcgcgccagttgattcttgtagcgcttggtcaacagctcctggatggccttgggctctttgccggcgatcttcaggcgcagcacttcgtccttgacgcgtttgcgccacaggtcgtcaagcgcggcggtgctggtcagccaaggcgcgtccttgcggtccaccagaagggtttccttctgggtgaagtcgagcttgtcgacgcctttgcccagctcactcagggcgaagtccagacgcgctttgacgcggtccaggtaacgcttgtagatggtgaacgcgggctgcaggtcgccgctcttgaggaagtcgtcgaactgggtcttccacttgtcgaactcagcgatatcgctggccaggaagtagctgcgcgacggatccagcagcttgaggtagctgtcgtagatgatcaccgagcgagcgtcgtccagcggcggcttgctgtagtgatgacgcttgagcaactcgacgacgttaaggctggcaatcacctcatcgcgatcaggttgaagattgtcccagctgttggctgcgaacgtattggtcgacatcgacgcgaagccgagaccaatgaatagagcgagggcggtgctggggaacagatgcttcatgctgattcgacgcgggggcaattgataacgcatattaggccgtctttgagggagccggttccatatggtccggtcgcataatgcaaaaagcccggcgatacagctacgggctcagtccagactcactatggaggcactgtgaaagcattgcaaggcgttgacggtcatgtggagtggttggaagaacccagtcctacttgcgatgtagggcaagttcgtattcgtgtggcggcagcgggcctcaatcgcgccgatttattacagcgggcggggctctatccgccgccgccgggtgccagccacgtgctgggtctggagtgttccggggtgatcagcgaagtgggcgccggctcgtcctggcaagtcggtgaccgggtttgcgcactgctcgccggtggcggcatggccgaggaagtggtggtggatgcgcgccacgtgctgccggtgccggaaggcctgtcgctggtcgaagcggcggcgctgcccgaggtgtacagcacggcgtggctgaatctgttccagttggcgggcctcaagcccggtgaaaaggtactgctgcatgccggcgccagcggcgtgggctcggcggcgatccagttgtgcaaggcgtttggcagtccgtgctgggtcagcgtcggctcggcagagcgcctgacctattgcgaggagctcggtgcacagggcggcgtggtgcgtaccgacggcatcgaggggttgcgggatttcgggccgttcgatgtgatcctcgacccggtcggtggcaactatgcggcgctggacctcaagctgctggccctcgatggtcgttgggtgttgatcggcttgatgggcgggcgtgacgcgcaactggacctggcccaggtactgggcaagcgcattcagttgctgggctcgaccttgcgcagccgcagtgatcagttcaaggccgacctgttcagcgacttgagccagcatgtgtggccgctgtttgttgaagggcggctgagcccgcagttggccaggacctttgcgatcaaggatgccgaagcggcgtttgccgagcttgcgaccaaccggatttccgggaagttggtgttggtgattgacgaaagcctgagctgaattgtaatgcgtttaataatgtgggagggggcttgcccccgatgacagtgnnnnnnnnnnnnnnnnnnnnnnnnnnncactgtcatcgggggcaagccccctcccacatttttgatctcggctcaatcagacccagtgatggatcggccagccggccttttcggcatgctcgcgcaacaccggatccgggttcactacctgtggatgttccaccttcagcaacaacggcaaatcattgcgcgagtccgagtagaaatacgcaccgtccagcgtttcaccttcctgctccagccactccagcaagcgggtgatcttgccttcacggtaggtcaatacaccctcggtatggccgctgtacacgccgtgcttcacttcaaggttgatgcccaacacctcatcaatgccgattcgtgccgcaatcggtgtaaccaggtgcgtgccggaggcagagatcaccaggatccggtcgccattcgcacggtggcgggcgatggtcttggtggcgtcgctgtagatcagcggttcgatcacgtcctcgacccacggctccaccaggtgttcgatttcctccggtgtgcggccgatcatcggttcgaggctgaaagccatgaagtcttccatcttcaactggccctggctgtaggcgtccatcagctcgtcgttcctgcgcatgaacgactcagggtcgacccagcccaggctgcccatttgctcgctccacagggtggcgcagtcgccgtggatcagtgtgtcgtccagatcaaaaattaccaatgccatccgtcatgctctctcaataaatcgtcgctgctcaggctacttcacacagggcgctggggtcgatggaaagtgccaggcgttgcccgtccgggtgcaggtcgtcggccgagcggttgagtacgtctaccaccagttccacgccacgggcttcgatgcggtagcggatcacgttgcccagcaggctgtggctgcgcaccagggcatccaactcaccattgcggctcagctcgatggcctccgggcgaatggcgatacggctgttgatcgggcgttgcagcaattgggtggccttgtcggcatccagcaggttgtagttgccgatgaacccggcggcgaatacgtccaccggcgcggtgtagagagtctcggcatcgccgctctgcacgatcttgccctggttcatcaggaagatccggtcggacatggtcagggcttcttcctggtcatgggtcacgaagatcgtggtcaaccccagctcgcgctggatctggcggatctgctcgcgcaggtgcttgcgaatccgtgcgtccagcgctgacagcggctcatccagcagcaacaggcgcgggcgcgtgaccagggagcgggcgagggccacgcgctggcactggccgccggacatctggtgcgggtagcggccggcgaggtccttgagttccaccagttgcagcacttcctgcacgcgcttgtggctgtcgtcggcgttgaccttctgcatgcgcaggccgaaggcgacgttctgttccacggtcatgttggggaacagcgcatagctctggaacaccatgccgatatggcgtttctgcgggctcagcgggacgatgtcctgcccatccagcaggattttgccactgtcgaccgaggtcagcccggcgatgcagcgcagcagtgtggacttgccgcacccggacgggccgagcagggtgacgaattcgcccttggcgatttcgcagttgatatcactgaacaccggggtgccggcgtagcctttctgcaggtgttggacgctgacgaagctcattggcttttgtccttgttcaagatattggcggcccaggtcagcaccagcacaaagaagaagtaggaaatcacgacggcactggtgaagtggccgctgctgttgcgcatgttgttcaggtacacctgcagggtttcgtagcgggtgcccacgaggatgttggcgaacacgaactcgccgaacaggaacgagaacgacagcaacagcgccaccatcaagcctttgcgcaagttcggcagcaccaccaggatcgccgcctgccaggtgctggcgccgagtagttgggaggcgtccatcaggtcgcgcaggttgatcgcttgcaagttgttggtgatcgcccggtacatgaacggcagcgcgacggtgaagtagcagccgatcagaatccacggcgtgcccaccatcgcaaagggcccggagccatacagttgcagcaggcccaccgacgacaccaccggtggtaccgcgaagggcagcaggatcaggatgttcatcagcgcatcgagcttgggaaagtggtaatgcaccacgaacaacagcggcaaaatcagcaccaccgacagcaccagcgcacccacgcacaccagcagcgattgcccgaaggccatcaggaagcgcgggtcgctccacagctgcacgtaccatttcaccgtgaaaccagctggcaggattgttgccgaccaactgctggcgatggagtagacgaaggtgcccaccaacggcagcaccaggattgcaaataacagccacaccaccacacggtggtagagggaggccgggccggcttcagcgcgagacatggtagctcctcttgagcagcagttgatggaccacggtgaccacggtcatcagggccaccagcaccacggccagggcgctggccaggttcgggtcaagggacacgtcaccggacaccagccccgcgatacggatcggcagtacgttgaagttgccggtggtcagcgcatataccgtggcgtaggccccaagggcgttggccagcaggatcacgaatgtaccgagcagggccggggtgagcaccggcaggccgatatgccgccagaactgccagccgttcgcgcccagcagcgacgccgactcgcgccagtcttcgcgcagcgcatcgaatgccgggtacagcagcagtacaccgaggggaatctggaagtaggtgtagagaatgatcaacccggtcttcgaatacaggttgaagtcctgaatgatccccgcctgcttgagcatgatcgtaatgctgccgttgaaacccagcaaaatgatgaaggcgaacgccagaggcacaccggcaaagttgctggtcatgttggcgaaggcggtgacgaagttgcgcagcggcgagtccacccggcgcagggagtaactgccgagggtggcgatgatgatgccgaacacgctggagtagaagctgatctccaggctgaactggatcgcttgcaggtagaacttcgagctgaagatgcgcgtgaagttttccaggccccagccagcctcttcggtttgcagactgttgatcagtacccacaccagcggggcgatttcgaacacgataaagaacagcgcgaaaggtaccaggcacagcagcgctagccatttgcctcggatcatttcaacagctcccggcatacaggtttgtcgtggggtacgcccagcagctcacagacggtgccgcacagctcggtctgtttcggtgcggcgcgggtgtccaggctgaacgcagcgcccagcacaaacagcggcacttcgcgttcttcggggagcaggccattgtgggagcggtcgttgttcatgccgtggtcggcggtgaccagcacctggtagccggcatcgagccaggtgtgcaggtagtcggccaggatgatatcggccgagcgtgcgctgttgcggtactgcggagtgtcgaggccgtgcttgtggccggcgtcgtcgatgttcatcggatgcaccaccaggaagttcggcgcgtgcctgaggcgcaggctttcggcgtcggcgaacaggtgggagtccgggtagtggtcattccagtagaaatgcccgtgctggatcgccagcgccgtgtcgtcggtatgacggtcgcgggcggcgaggaagggcgtgcggttatacaactcgctgacccagtgataagccgccgctgccgtggtcaggccggcgtcggtggcgtaatggaaaatgctgcgctggttggacaggcgcgagacgttgttgtggacgataccgctctggattgggggtacgccggtgaggatgcattcatacagcgggcgggacagggcgggcagttcacattccagtttgtacagggctgcgcgtcctgcgccgacataggcctgcaagtgccccatggcgtgccgcgcaacctcgaagttcaggccgtcgagcacgacaaggatgacattgtgcttcatggggggaggcgctccgcaacgatggacttgactcaatattcctggtgcatctgggttcaagtgtgggagggggcttgcccccgatagcggcgtgtcagtttgaatacctgtcactgatccaccgccatcgggggcaagccccctcccacattggatctccagtggagtccagtgtgaggtggcaggcttacttcatctctacgatgacttgctcgttccacaactgaggcagcttcttggacgtggcttcccaggcatcggcatccttgatcggctgcgggttggccttggtgtactgctcgcccggaatcaggttcttggcgatctcggccggcagtttcaggtcggtttcagcgcggatcggacgcgcattgcctttggccaggttgagttggccggcgtcgctgaagatgtactcgcgggtcagtttggcggcgttcgggtgtttggcgtatttgttgatgatggtggtgtagccggatttcaccgagccgtccgatgggatcagcaccacgtagtcatccgggttggccatcttggccttgtagctcaggccgttgaagtcccagaccacgcccacttcgacttcgcctttttccatggtggcgatggtcgggttggacagcgagagacggccttgctgggcgatcttggtgaagaattgcaggccaggggcgatgttcttttcgtcacctttattggcaatggcggccgccagcacgccattggccgcttgcgccgcggtgctcacgtcgccaatggaaactttgtatttgcctttttgcaggtcagcccagctggtgggcacgtcagaaccgtgcagcagtttcttgttgacgataaacgcgatggtgccggtgtaggccaaggcccagtgaccgtccttgtccttggcccaatccgggacctgggcccaggtggacggtttgtacggcagggtgacgtcctgcttcaccgcaatcggaccgaacgccgcgcccacgtcgccgatatcggcactggcgttgtctttctcagccttgaacttggcgatttcctgggccgagctcatgtcggtgtcaatgtgcttgaggccgtaggtcttggccaggtcttcccaggtgcctttccagttggcccagtcatcgggcatgccgacgctgttgacagcgccttctgccttggcggcagcttccagggtttttagatcggtatcagcggccatggcggcggtgcacatggcaatggtcgagcctaacagtgatgccaggaaaagctgtttcatccgaagctcctttgggcgttttcaacgcggcggttgtttctgcggtgttgttggtctaggtcagagcaatacctgagccaatctaggctcgatggatgacagtttcatgtcgatgtcgtttttaaatcgctgatgtcgctcgtcgcagagtgagcgtagaccatgctcaagcgcccgcagggattggacttggccgatgtattgcagggtgtgctgcgacggatgcacacggactgtcatctgtcggtcatctgtaatacctaggctggcactcaaccgtgcaagcccctttacgcagcggtttgtgcaccttgtcggtgctggtctagtccagataggtaacgttgatgcgtgatgaggcaatcaaggcggtgacatccatcggcctggcgctgcaagagcagatcgaccacggcctgttgccgcctgccagcaaactgcccgccgagcgtaagctcagcgagttgttcggtaccactcggattacggtgcgggaagccttgttacaactggaagcccagggccagatctatcgcgaggaacggcgcggctggtttgtctcgccgccacggctggcctacaacctgatgcagcgcagtcactttcacgcgatggtcagcgaccaggggcgggtggcttccaccgaggtcatctccgcgcggctgcaaccggcgtcggcggcggtgtgtgcgtggctgcagttgccggcgctgtcgagcgtgatccagatttgccgtggccggcgaatcgatgggcgcctggtgttgtatgtggagcactacctgaacccgcagtattttcctgggatcctggcgtgtgatctgaatcagtcgatgaccgagttgtatgcgcgcaagtacgacctgcactacgggcgggtgcgtttcgagatcgtgccgacgtcactgccggtggaggccgccgcggcgttgcgcgtgtcggtgggcagcccgggcttgcgtatcgcccgggtcaactatgaccagcatcagcggttgatcgactgcgacctggagttctggcggcatgatgcgattcatgttggtgtggatgttatgggatcagcgccttgatcacctggtccacattggtttccagctccgccaccggttccgcaccgtccacattcagcaccagcagcttggcgccacttgcagtcaccgccgccgtcaccgcctcgctcggctggcgatgatgcagcaccaccgccacatcgttgtccttcagctcggccgtgagcttctgtaacgcctcgggcgtccagtcggtatccggccgcgcatcggtgctgagcacttccaggttcaaactgctgatcagataagcaaagtgatcactcaggctgaccacgctcaggttgtccgccttggccaggcgcgcttcgctgtcggcggtgagtttgagcaggcgctgcttgagggcggcaaggttggcgtcgattttcggcttggcatccggggccaggcggcccaggtcggcggccagtacatcggccatgcgccccatattgttgctcgactgccacggctggctgttcaggccatcggcaacgcccggctgtacggcgatgccgggcaagccaccatctaccgggcgggcggcgtcgacttcgacgatgcggatattgctgcgccgcgccaccgggtacagcgggtcatcggcccacaatgagcgcaggccgatggcggcgtcggcgtccagcgccaatttgctcagggccggcgcgccacgcccggtgaagtaggacacctggcgtgaacccggcaagttggccggcgcggcgcgctcaagctgtacgttggtgcctttgagcagcacctcggccaggccgtaggtaatcggcagcgaagcgaggatcttcacctgttttaccgaagtggccttgctcagtgcggcgtggcccaatccctgatggatcttgagaggcttgggctctaacccgtcgaccgccagggccgaagtgctgatgaaacatgtgatggccagagccaatggacgaagtacaggatgcattatccaagattccctttgaggctgggcaccgtgccgcgcgcgatggcggccagggcgaaggcgataccggcgaccaggatgatggcggcgccggacggcacgggcaggtcgaagatgatcggcagcaggatcccgcacagggtgctgactgtggcaatggcgaccgagacccagaagaagcccttgagcgactggctcaacagccgcgccgcagccgccggaatcaccaacagcgcccccaccaggatcgcaccgatgaccttgaccgccgcgacggtgatcagcgtcaccaggatcacgaacaggtagtccagggttttcacggcgacgccgcgtaccgccgccagttgcggattgaaactggccagcatgatgcggttgtacagcggcagcgccagggccatcaccagcgaaccgacaatcgccagcaccagcaggtcgttgccgttgaccgtcaataccgagccaaacagcacgttctcgaggatgtgcacgttgatcttgcccgccaggatcagcaacaggctcgcccccaatgccagtgacactgacaggaacaccccgatcagggtgtccggcgccaggcccgtgcggttgcgcaggtagttgagcaggatgccgaacagcaggcagtagccgaacagcgcgccatacggcccggtgtagggctcacccagcagaatccccaccgccacgccggtcaacgcagcgtggccaacggcttcggagaaaaacgcgaagcgcttgaccaccaccagcgtgcccaggccacctagcaccgggccgatcagcaaaccggcgagcagggcattgaccacaaaaccgtaggccagcgcctccggcagataaccggaagaggcccagccctggaccatcaagcgaaaggcttcataactcattgcgccgggctccgagggtgggtggagaacagggtcagcaggcgctccggggtcagtgcctccttgggcgtggcgtcgaacagcacgcggcggttcaggccggtgacgcggtcggccaggcggcccacggcttccaggtcatgctcgatccacagcacggtgatcccggccaggcgccagtcattgagcaggcgctcgaacacctggataccggcttcgtcgagggccgacatcggctcatccagcaccagcaggtgcggcgccgggatcagcccctgggccagcagcacacgctggcgttcaccgccggacagcgcgcccatgcgccgcttgcgtttgtcctgcatgccgacgcgctccagcgcatccccgatcgcaccggcgtaatgcttggacaaaccgaggaaagccgggcgccgttggcacatggcggccatgaaatcatccacggtcatcggcaagccccggtcgaactccagggcctggggcacatacccgatggtgccgggcgcggccggccaatgcaggctcagccgaccctgatggggcgtttgcccgagcagggtcttgatcagcgagcttttaccgccgccgttggggccgaccagcgcatggatgctgcccggctgtacctggaaactcacggtatcgaggatcacggtgcgacccagggtcagcgatacctggtcgaactcgagcgtcgggccgacgctgaccgccttcagctgttgcgccgccgtcatgccccggactcctgaatcgcccggaccaccgtattgaggttgccggtcatttccacttcgtacttctcggcgctgtattcgccgtaggaaatatgtgacagcgggtacagcttgaccccggactcacgctgaatggtgtcgacgtaggtggacgggaagtccatctccgagaagatcaccttcacgtccagggcgcgcagttcgtcgatggttttcttcaactggctggggctgggctcgatgccatgggccggttcgaccacggcggtgacttccaggccgaactcgcgcaacaggtagtcgtaggccgcgtgcacggtggccacgcgcaggtccgggttgggcgcgctggtcaacttggccagggcatcggcgcgcatctggcgcaggcgcttgccgtaggcgcgggcgttctgggtgtaggtcttggcgttgtccgggtcgagcttgcccagttcacgggcgatgttgttgacctgggcaatcgatgcgctgatcgacaggaaggtatgcgggttgaccactttgcccgcgccgcgtgcggcgttgccggtggcggccagcaacggcacattggcgttggcttcgatcaccgggatgtccggacgctcgctggtggcgatcatgcggtcggcgaaatcgtcatggccgacgccgttgagcacgatcacgtccagggtgccgatgcgcttgatgtcttcggcgcgtggctcgtaggcatgggggttgaagccggccggaatcagcggcaccacctcggccttgtcgccgacgatattggccacgtagctgtaataagggtgcagggtgatgccgattcgcaggcgtttggcggcttcggcattggccagaggggcgagcatcaggctgaacaggccaaccagcaacaggcgcaacaggggcgatgaaatagacatgggcaatcggtcttctcgttcagtgacggtgctggcgggtgacgccggcatcgaattgcgcaaccacctgctgccagccggctgcgatcagcgcctggtcagagaggtcggagggagcggcgaggttggcctggcgattgagccagatgtccggctcgacaccgtgcacgcgcatcagcagtgaaccgctggtcgccggcgcctggctcacacccaggtaggccgaaggctccagcaattgccagcggtgatcgccacggctgaccgaactggcatcctgggcaaagggagcgaagccttcttcggccagttgcgccgggctgggcagcgcgctttgctcctgctgcaacagttggatctcatccagggtcacccgcaggtcggcataaatgccttgctcggcggcgctcaggtcgcggcgggcgtccaattggtggctcggtattgccgccacctcctgggattcaccgtgcagcgcgaccaccgagccggccaccgcgaggatgatcaggcacaacagcagcacgtagagggtttcgtgaccggcaccggcggggcgtacaacctgtgtggtactcattgcggctggatatccgcttggtcgatttccaccacatggccgggaccggcatcaaacagcacgtagaactcggcggacggtttcttgaaggtcagggtcgagtcctgaccgagtttgccgggcaccaggatggtttcgtcatagccgatcacgtccagggtcacgccgggtgcaccactgccgtcggagaagccgcctttgcattggatctgctcgccggggatctccttgcactcgcacatcgggttgtgggcgagcgcgacggtgctgaagccggcacctatcaacaggacgccacaggcgcgggtcaatcgcatcaaattcatggtttaactccttgcttgttcagccaggcaatcgtggcaggcgaggcctggctcaacgggatggaaccctggtgcatgctgccgtcccagccttccatggtcacccacagttcggcgtcgacgggcgtgcgttccgggatcggcaggccggcgcccatgcggtacggcgtgccgaagaagatcaccccggcagcccgcaggctgcgcggcttgccgatgcgcaggtaggtggccttgacctggtcggcacagctgtcgcacagggcggcgttgaagaacttcatcgggccggccgggtcgggacgcgggccttcattgcgaaactcggcaagcttcaggctccacgggccgacctgcacgtcgccagccactcgctcgccgataccggtgtcgccgcgaaacagtgccgcatcggcaaagtacttgggcatgaagcccagcggcaccagcaacagcagcacgttgatatggaaacgccatttcagccagaacgcccgcagaggcgatggctttgccgcagcgaccttgctcatgagttggcctccgaggtttctgcctgccgggcggggagggaaaccggtttgtgttgagccttggcttcacgcttgaaggcattgagggtggccaaagcggtgcgcttggtccagatcagcaggccgctcaacaccatcatgctcatgatcaggccgaagaatgcccagatcagcttgatccagatcccgccgaagtcgccggtgtgcagcgggcgcatggattcggtgacgaactccagcttcgagcggtcggacagcaggtgcgccgctgccacttcaccgtcgtaggggttgatctgtgcggtctggaacatcaacgggtaccagccccgcccgccgatctgcaggtggctgtaggcattcaggggcaggctgatgaaactcgcctccaggccaggaatgcgctgggtggcgatcttgatcgcctcgtccaccggaatcatgggggccggcacgccaggcgcggacatcggcactttctcccgggcaatcacggggatgaccggttcagtggaaatcgaaatctggttgtcgcccaaaatcgcgcggatcaggaaccagatgccggtgaccgagatcaccgcaatgaaccagatcgaccagatcccgctcaagcggtggaagtccccccagaaaatccgcgcgccgtggcggattcgcagggtcgggcgcaggaagcctttccagaaccgcttgtacaccaccagcccggtgaccagcgacgccagcagcgggatgccgagtgccgacaccaggtaccagccccagctgtagccgttggtgaagggcaccagccaccagccatgcagggcgcgggtgaattgctggaagttgaaggacgggctgatgccctggatcgccccggtgtacgggttgacgtagacctccaccgaacgcccgtcggggtagctgaggtcgacgctcaaggcaaagtgcgactcgtcggggcggctgatcgactgcacgtacacctggggttcgtcgcgcttgatggcggcgatcacctggtcatagctcagcggttcggcatcgtccgagggcttgctcgcacggatatccgggttggccagccagacgatctcctggctgaccaccgccagggtgccagtgacgcagacaatcagtacaaagaaccagataggcaatgccagccagctatgtacgagaaaccagagtttggagcgtgacttcttcgacatgtgaatgagggtcttgatcggaggggggcaatggaggcccggaaaaggccagtcgtagcttttgctgacgcgacgggctgtatctaagttaagacggatgagaatgagaaatccctaaggcggatatgaaagaaaatgtttcaggttcacattcagggcgctttttcgccttgatcgaacacgaaacatgttccaagccatcacccaggcgccattgatggggcggggcggctgcgtaggatgggcgcataccgttgagcgagcgcctacaaaagtgagtttagaaaaatgactgcccgaaccctctacgacaaacacatcgattcccacacggtgtgccccctggatgaccagggccatgtgctgctttatatcgaccgccaggtgatcaacgaatacaccagcccccaggccttcagcggcttgcgtgaggccgggcgtaacgtgtggcgcccaggcacggcgctggccgtggtcgaccatgtgaaccccaccacgcccaagcgcatcgcggcgatgcccgacgcaggcggggcgcggcaagtgtcctacctggcggagaactgccgggacttcggcatcgagctgctggacatcctcgacaaacgccagggcatcgaacacgtgatcgccccggagcagggctttatcctgccgggcatggtgatcgccgccggtgacagccacaccaccacctacggtgccctcggcgccttcggttttggcatcggcacttcggagatcgaacacctgctggcgtcgcagacgctggtctacaagcgtctgaagacgatgcgcgtgagcgtggacggcaatctggcacccggcctgacgtccaaggatgtgatcatggcgctgatcggcaagatcggcgcttccggtgccactggctatgccatcgagttttgtggttccactatcgatgtgctgagcgtcgaggcgcgcatgaccatctgcaacatggcggtggaggcgggcgcgcggggtgcgttcatggcgccggacgaaaaagtcttcgcctacctcaagggcaagccgcgtgcaccacaaggcgagctgtgggaccaggcgctggtaggttggcgccaactgcactcggacgctgatgcggtgttcgaccaggaagtgcacctcgacgccaccactctggaacccatggtcacctggggcaccagccccgaccaggccgcgcccatcggcgcccgcgtgcccgacccgcaggatgtcagcgacctgatcctgcgccaggacatgcgccgcgcgctcaactacatgggcctggaagccggtatgccgctgagcgagatcgtcatcagccatgccttcatcggctcctgcaccaacgcccgcatcgaagacctgcgcgacgccgccagcgtggtgcgcggcaagcgcgtggctgaacacgtgcgggcgatgatcgtgccgggctccaccgaagtgcgtgaccaggccgaagcggaaggcctggcggcgatttttatcgatgccggctttgaatggcgccagtcgggttgctcgatgtgcctggccatgaacgacgacgtgctcgcccccggcgaccgctgcgcgtccagcaccaaccgcaacttcgaaggccgccagggcgcgggtgcacgcacccacctgatgagcccggcgatggtcgccgccgctgcgattaccggccgccttactgatatccgccactttggagcgcgcccatgagcctgcaacccttcaccctggtcaccggcaaggccgcgccgatgctggcggccaacatcgataccgatgtgatcatgcccaaacagtttctcaagggcatcgaccgcagcggtctggaccgcgggctgttcttcgacctgcgtttcttggcgtccggcgagcccaaccccgagttcgtgctgaaccagccggcctggcagggcgcgagtttcatggtggtcgggccgaacttcggctgcggttccagccgagaacacgcggtatggggcttgaagcagatgggcatccgcgcattgatcggcagcagctttgccggaattttctatgacaattgccagcgcaacggggtgttgttgatcaccttggacgaggcggtgttgcagcagctgggcaagaccgtcagccaggcggaccaggcgcagatcaatgtcgaccttgaagcccagcagatccatttggcggatggccaggtgatcccgttccagatcgataccctgcgcaagactgcgttgttgcagggcctggatgccatcggcagcaccttgcagcgcagtgacgagatcaaggccttcgaacgccggcacctgcaagccaacccctggctcacctgacatacttaggcctaaatgtgggagggggcttgcccccgatggcgatgggtcagtcaacttctgagtgactgacactctgcaatcgggggcaagccccctcccacatgtttatccggatcataccgcttagattgagagccccttgaagtgctcctgcaaaaactccacgcaggcccgcagctttccggaatacgccaaccgtgtcgggtacaccgcccacacgttggcgctctgggtataaccgtgcagtatctgcacgagcttgccttgctccagcagcggcttaacatcccacatcgagcgcagcagcaccccgcgcccatccaatgcccactgcaacacaatctcgccattgttcgatgacagcggcccacgcacgcgcacgctttcctgggtgccgtcgcgctccaggttccagatgccaaacgcgttatcacgctccttgagcaccaggcagtcgtgctgctccaggtcgctcaactgttgcggtgtgccgcgtcgctccagataagccggggcggcgcacagtacgcggcggttgctcaccaggcggcggccgatttgctggccagggatgtcgtcacccacgcggatctccaggtcgaagccttcgctgacgatatccaccacgcggtcgaataggtccaggcggatttccaggtccgggtattgctctgccagtaacgacagggcgggggccacatggttgcgaccgaagccgaagctgctgcacaaatgcaggtggccgcgcgggctgtcatgggcgtcggagagttcatcggagagatgctggaagtcttcgaggatgcgcacggcccagcgctgcacccgttcaccgtcttcggtcagggcgatgcgccggctggtgcgatgcaacaggcgggtggccagggtggtttcgaggatctggatgcgcttgctgacatacgccggcgacaagcccagctcatcagcggcggcagcgaagccggccttgcggatcacggtcaggaacacccgcaggtcttcgggtaggggcacggtatctttcttgttagtcatcgcaaacagggctggcggcatgagccgccagaatagcaccggttgagcgcgccttccggcacgcccaggtgttgtcgattattcggcggcgaccttggcttgagcagccgcccgagcatcgcggccgcgcttgagagcgatgggcgccattttttcgcggtccagttcaccctcccaggcggctaccaccagggcagccacggcgttgccgatgatattggtcagcgagcggcactcggccatgaaacggtcgatgccgaggatcagcaccatcgccgccaccggtacggtcggcaccaccgccaggctggcggccaatgccacgaaccctgcgccaaccactgcgcctgcacccttggacgtgagcatggccaccgccagcaaggtcaactgttgctcaagcggcagatcaatattggtggcctgggccaggaacagcaccgccagggtcatatagatgttggtgccgtccaggttgaaggtgtagccggtcggcaccacgatgcccaccacgcctttggaggcgcccaggctttcgagtttctggatcaactgcggcaacgccgattccgacgaactggtgcccagcacgatcaacagttccgacttgatgtagcccatcaacttgaaaatgctgaacccggcgtagcgggcaatgctgcccagcaccaccgccacaaagaaaaacgcggtgatatagaaggtgcccaccagcttcagcagcggcagcaacgaacccaccccgtatttgccgatggtgaacgcgatggcgccaaaggccccgatcggcgccactcggctgatgatgccaacgatgcggaagaacacctcgctggcctggttgaccacacccaccagtggccggcccttttcaccgaccattaccaggcccacaccaaacagtacggagacgaacagtaccggcaggatttcgcccttggagaacgcatcgaagaaggttgcggggatcacgtgcaacaggaatccggtgatgccttcgccatgttcggcctggccgacgaagttggcgatggccgaactgtcgagggtcttcacatcgatattgaagcccacgcccggatgcaacaggtgcgcggcgagcatgccgatcaacaaggcgatggtcgagactatttcaaagtacagcagcgccttgccgccgacccggcccacctgcttcacgtcgtgcatgctggtgatgccagacaccaccgtgcaaaagatgatcgggccgatgatcatcttgatcagcttgataaaaccgtcgccaaggggcttgaggtcgatgccgatctgcggccattgatggccgatcaacacacccaatgcgatagcgatcagcacctggatatacagggttcccagcagttttctgattgtcattgttattatctcgagacgttgttttgggcaaagcgaacccgtcgcaggccattggcagcctgcgaggcgggcggatcagttcacggggtgacgcagttgctcagcgaaggaaggtcaggacttcgcccagcagcaactcaggggcttcttcagcaatgtaatggccggccggcagggccttgccacgcacgtcagtggcgactttctgccattccttgagcggctcgaagcagcgcccgacagtgccttcggcgccccacatcaccagcaacggcaggttcaggtgattgccggcgtcgatgtccgcctggtcgtgctccaggtcgataccggcggcagcccggtagtcctcgcagatgcccgtggcggcgcccggcagtttcaggcagcgcaggtattcggcgaaggcttcctgggtgaacggcttgagcccggcgctgcgactgcccatcacgctgcgcaggtacagctccgggttgccttcgatcaaggcttccggcaacggcgccggacggatcaggaaaaaccaatgccagtaggcacgggcgaaggcttcgttggtctgtgcgtacatggacagagtgggggcaatgtccagcaggaccatgcgttgcacggcggccgggtggtccagcgccaggcggtgggccacgcgggcgccacggtcgtgggccagcaccgagaacgtgtcgaagcccagcgcctgcatcagctcgacgccgtcccgggccatttcccgtttcgagtaattggtatggtggtcattggccggtggcttgctgctgtcgccatagccgcgcaggtcggcggccaccacggtgaagtgttcagccagttgctcggcgattttgtgccagatgacgtgggtttgcggatgcccgtgcagcaggagcagaccgggacctgtaccacctttgcggtagctgatgtccacgccgttgacgtggtactggtctttatggaatccggcgaacatggaatgactcctctttgtaattgcttgcatcctggaatcacgcggcgttcggggcaagggcaaaaacgtggagggggtgttcatgaagtgtgatgcaggagcgggctggctcgctcctgcaaagggtcagccctgtttgaacatggcctcggcgcgttcgcggatctgtgcttcggtcaggtcttccttgtgggtggccaggaaccacacatggccgaatggatccttcaacgtgccggagcggtcgccgtagaactggtccttgggttcggagatcggtgtgcccccggctgcgatggcttgtttgtaccgggcgtcgacgtcatctacatacacatgtataccgacgctggtgtggccatcgcgtgggctgccgaacgcgctttcatcgcagggtgaaccgagcatgatcggtgagtcgccgatgcgcagctcggcgtggccgaccttgccgtcgggcatgtccaggcgcatggcttcgatggcgccaaaggctttcttgtagaactcgatggcttcggcggctttttcgacacccaggtagggcgtgatgctgtggaagccctcgggaataggtttaacgctcatatcgttctccttgattgtggttgtggagggacggtcttttcactataggccacgtatcgcgtggcctgcgggcagccgacgaggtgtcgggggcgcatcatgcatggggtgtcggttccaacaactgtgcccctggcccgcgttcaccgagctggtcatcctgattgcgcaacgggcacgcttccagcgacaaacacccacaaccaatacagccattgagcttgtcgcgcagcaacgtcagcttgttgatgcgctcatccaggtcttgccgccacagcgcggacaaacgctgccaatcctgggcgttgggcgtgcgcccctccggcaatgtctgcaaggcttcgccaatcgttgccagcggaatccccaggcgctgggcgatcttgatcaccaccacgcgccgcagcacgtcccgtgggtaacgccgctgattaccggcattgcgattgctcttgatcagccccttggtctcgtagaagtgcagcgcggtgaccgccacaccactgcgggcggccagttggccgacggtgagtgccttgttgagcataaaaactccagataagtgcttgaccttgacttaactagaggttttagcctgcgtgacatcgaatcgcaagattctgcctacagagaaaggggagtgttcatgcaggtatctgagaaaaatcgcggcttcactcaattgatcgagtttcagatcgagccgcagcaacaatctgccctggtgtcagccctgagccttcagagcgaacgcctggcccaaggccatggcggctttatcaatgccagtgtgcaggtcagcgatgacggacggcgggtgctcaattacctgcaatggcactcgcgtgaagacggcgaggcggccttccagtgttttgagcacggcgaggaagatttctggacattgattcgcgcccaccaggccacggccgtgaccttcggttcgttccaggtgctgcgcagtttcgagcgcagccacgacaacgcgttgcactgccggctaaatggataggtgcagcatgcgctcaccttgcacgttttcgccggggcggcgcttgttcaccgccagttcgccgatcttgatcaggcgcgtacgtgtgacgttgcggctcaggccgagcaggctggcggtgtgcacctggttgtagtggctgaaacgataggcggcccgtagcagggcatcttcgactttttcatgcagggcgccggcctgttcttcgaacagcttctggaaggcccgcgctagcaacgcctcggcactgttgtcgctgccgtgctggctgtcgtcctggcgctcgatgcgcatgttcgacaggcgcagatcgtcgcgctcgatcacgccgttacggcagatcaacagggtatggtggatcacgttttccaactcgcggatgttgcccggccaactgtagcttttaagcttgtgctcagcctcgcggctgatggtgatcgggccgtaacccaggcgctggctgtaggcttcgataaagtgccgggtcagcggcaggatatcgccggggcgctcgcgcagcgggctgagttccaggctgaccacgtcgagacggtagtagaggtcttcgcggaagtgcccggcgttgatggccttctccaattgcacgttggtcgcggccaatacgcgcacatcaatcggaatgctcttgcgcgaacccaggcgtacgacttcgcgttcctgcaggacccgcagcagtttgacctggatcgccatgggcaaatcgccgatctcgtcaaggaacaaggtgccgccgtcggcctcctcgaaccagccggccttggcgctgagggcaccggtaaaggcgcctttctcatggccgaacagttcggcctccaccagcgactcggagaacgccccgcagttgaccgctacgaacggccggttgcgccgtgcgctgaggttgtggatgtggcgtgccaccagctctttaccggtcccggtctcgccgatgatcagcacgctggcttcgctgggcgccacttgctggatgtgatcgagcagtgcctgggatttcgggtcttcgaagacctgggccgtggcgcggatcgacgtcgcgagggcaggtgagggcggtagggtcaaaagctgcatgggcacctctcttaggaatagaacgtcggaatcggcaaggagtggttcaatgcccagtcccccagttcgtggagtttgtagtccaccgggtcgtgcagggtttgcgtgcgcaggttgcgccagtgacggtccaggcgcagtgacgcatgggtggagcgcgcaccggtgacttcgaacaggcggctgcacaattccaggccctgctgggtggcggcgaccttggcggtggcgatggcaatcgccagttggccgcgctcgtgctcgctgaggttcgggcctttggcccaggcttggtcgagcaggtcggcggcacgttctaccagcaggcgcacgccttccagggcgacccagaattcgccgtagtggtgcagcacgtatgggtcctggcgcacgtcttcggctgaggatttatgccaggcgcgggtttcggtcagcgtgtagttgcgggcttcttcgaaagcaccttcggcaatgccgagaaacatgtgcgtgaaggtcagttgggcaatcaacgggcgcaggcaggcgaagggcgtgctcagcgggcccggatcgagcagcagctcggattcttcgacgcgcacacgttcgaaactggcgctgccgctgtcggtctggcgctggccgatgttgttccagtcgttgtgcaaggtgatgccgctgcgcccgctggggatcgcggcgatcagcagtttgccaccggcggtttcgtccaccgccgaggcgatcagcatttccgagtcgctggcgccggagcagaagctctttttgccggagaactcgcgccagccgctgaaatccttgaccacggtgcgcgtgtccagcgggttgagggcgttgccccagaaccagtttttgcgcgcggtctgttcgaaccagggttgccattggtccgggcgcgaaaacaggcgcacggtggcgagcatcaggtggtgaaagccgaagacatgggcgatggaactgtcgaccttggcgaattcgcgcacgatacccagggtgtcgctccagcgtgcgccgaggccaccgtattgggggggaatgctcagggccagcaggccgctctggcgcagggcgtcgcgttcggccttgggcgtgccaccgcgctcgtcgcgttcgacggcggtgagggcgaattcggcggccagcagtctggcggtctgcaagggggacggcaggacgctgtggggtttggcggtcacacggtgttcctcattgatctcaagctttggtcggcaacacatcgttggcaatcatttcgccaaacggtccagtgaggttggtgatgccgtgcccggcaaggctggcgtagggctccggcagcaacgggaacaccagctcggcgaagcgataggcttcttccaggtgcgggtagccggagaaaatgaagctctcgatccccaggtccgcatattccttgatgcgttcggccacttgttgcgggttgcccaccaacgcggtgccggccccgccacgcaccaggccgacgccggcccacaggttgggggcgatttccaggttgtcgcggcgcccgtcgtgcagggcggccatgcggcgttggccttcggaatcaaagcgcgaaaaggatttttgcgcggcggcgatggtttcgtcgctgatgtgctcgatcaacgtgtcggcggctttccaggcgtcttcttcggtctcgcgcacgatcacatgcaggcggatgccgaacttcacggtgcgcccgtggcgggcagcgcgttcacgcacatccgcaagtttttccgcgacagccgcgggtggttcgccccaggtcaggtacacgtccacctgctcggcggcgaggtcgtgggcggcgtcggaagaaccaccgaagtacagcggcgggtaaggcttctgcaccggtgggtaaagcgccttggcgttctgtacgcgcaggtgtttgccttcgaaatccaccgattcgccctgcaacacgcgacgccagatgcgtaggaattcgtcggagacttcgtagcgctcggtgtggtcgaggaagctgccgtcaccacggttttcgtcggggtcgccgccggtcaccacgttgatcagcaggcggccattggacaggcgatcgagggtcgccgccatgcgcgccgagacagtcggcgaaatgatgcccgggcgaattgccaccaggtaacgcaggcgttcggtcagcggcaccagcgctgaggcgatgacccaggagtcttcgcacgagcgtccggtaggaatcagcacgccgtggtagcccaggctgtcagccgcctgggcgacttgtttcagataattgagggtgaccggccgcgcaccttgggtggtgcccaggtaatgaccgtcgccgtgtgtgggcagaaaccagaaaacatccatgaccaatccttaagcgattttcagcagagagggggagtgcgcggcaaacaaaggcgctgcgcgttctgccgccagttgaatacgggctttcagcaattcgctggttatctggtagtcggtgaagtcggcttcggtggcgtacacaccgatcggcagggtcagggcttggaagaagctgaacagcgggcgcagttgatgatcgaggaccagcgcgtggcgttcgctgccgccggttgccgccagaagcacgggtgtattgatcagcgcattgaggccgaccaggtcgaacagatgcttgagcagtcctgggtaggagccgcgatagaccggtgcggcgacgatcagcaaatcggcctgttcgatggccaacagttgcgcttcgacttctgccggcagttcatcacgggacagcgcaccacccagcggcctggcgatatcgcccagctcgatcagggtggcctggatcggcagcaaggtcgccaactcagccagcaccgcctgggtcaacaccagggtacgggacgggcgccaggttccgccggagagggcaacgacattcaggggacgggtcatgaacagttcctttttcaacagtggttcatagcaggtggagtgcaaccgcttgagcaagagctgtaccaacgggtgcaggccttgattgacgtgggttgcaggctcactgctgaaaaatgccggtgttggctgcctggtgatttgttgattggctgttgccagggcaacagttgcgtgggcaacagtgccagggcggtgtagcacccgttatagagggttgtatttattccgtaaatgaacgtatttccatatttatagatcataaagaaatataaaaggcactgctatcgaaggtgccttggcggttgatagcaactatcaaggcaggtgatttttcaccgtgaaagggcgggagtagcctgtcttcattgactcgaaacctcctttgcagggccaccgccatgaaccgattcctcgctgtttccttattgattgtcagctcagtccttgccggatgtgcgacccatccttcgcctgaattgcgtccctacaccgcggaagaaaccaaacagttggccctggaggcattgagccgtcgtggtttgtcgtttgacgaatatcaacagcagcgtgccgcactgaccggccagccacagaaacccttcggatttgatcgccagggcgaaatgaacgccgaacgcagcgtgaccctgcatggtcgtcccagttgaatccgcgctcagcggcaaaaaagcccgaggttatccacaaggatcctcgggctttttgttttccatggggcgacttcagcctgttaagctgaatttcaggagcgttcctacgcacatttacataaagtggtccttctttaatggcatgtgatcggttaaacctgacgacctctgtcccggtccgtgcccctgagacgctgctctcgggaacctgctctgcgagtttctaacgtcatgaataaacgtccgttgtatttcgactacgccgccaccaccccggtggatgagcgggtcatccaggtgatggtcgagtgtctgggcttcaatgccaatttcggtaaccctgcgtccagttcccacgcgttcggccaggcggcccggcaaacggttgaacagtcgcgtcgccaggtggccgaactggtcggtgccaaccccgaacaaatcgtctggacctccggtgccaccgagtccaacaaccttgcgatcaagggcgtggcccaggcgcggggcgtggcgggtgggcatatcatcaccagccagatcgaacacaaggccaccctggataccgcgcgacaattgcaggaagccggtgtggccgtgacctacctggtgccggacgccgatggcttgatcagcgccgaggccgtcagcgaagccttgcgtgaggacaccttcctggtgtcgctgatgctggtgaacaacgaactgggcaccctcaacgatatccccgccatcggtgcccgcgtgcgtgaacacggcgcgttgttgcatgtggatgcggcgcagggtgcgggtaaggtggcgatcgatctggcgcagtggccggtggatctgatgtcgttttccgcgcacaaactgtatggccccaaaggtatcggcgcgttgtatgtcgggccacgggcgcagcagaaagtcctggcgcagattcacggcggcggccacgaaggtggcttgcgttccggcaccctggcgacccatcagattgccggcatgggcaccgcgttcgccttggcggcggcgtctttcgctgaagaaaaggcggtgatcgtggctctgcgccagcgcctgcttgaccagttggattcggtggctggtgtgcgcctcaatggcagcgctacacagcgtattccacataccctgagcctcacgttcagtgaaggcgaattcaacgccgctgcgttgagtgcagggatcgcgttttctgcgacctcggcctgcaattcggccagcaatgcaccgtcccatgtgctgctcgccctgggtcatgatgcacgcagcgccagccgcaccatccgcttgagcctcggccggtttaccaccgagcaggatatcgaccaggcggtacaactgatcaaggcggccctcgccagtgcaccggcgttctgggcggtctgattcatctatcgcaacacataataattattcgtggttagcaggagacacaatgagtacgcagcccttgacccatggaacggttccccagcgcctggcgcatacccgtgaactgatgagccgcgagggcattcacgccctgctggtgccgtcggccgacccgcacttgtccgagtacttgccgggttactggcaggggcggcagtggctgtcggggtttcatggctcggtgggaacgctgattgtcactgcggatttcgccggtgtgtgggccgatagccgttactgggaacaggcgaccaaggaactcaagggcagcggcatcgaattggtgaagctgcagccgggccaacccggcccgctggagtggctggccgagcaaacgccggaaggtggcgtggtggcggtggatggtgcggtcatggccgtggcttcggcgcgtaccctgggcggtaagttggcggagcgcggcgcgagcttgcgtaccgatatcgacctgctcgatgaagtctggcaagaccgtccggcattgccgaaccagccgatctatcaacacctgccaccgcaggctactgtcagccgtactgaaaaactcgcttctctgcgtgctgccttgaaagagaagggcgccgactggcatttcattgcgaccctggatgacattgcctggctgttcaacctgcgtggtggtgacgtttcgttcaacccggtgtttgtgtcctttgcgttgatcgatcaacaacaggccacgctgtttgtggcgctgagcaaagtcgacgccgaattgcgggctgtgctggggcaggatggcgtgaccctgcgcgactacagcgaggttgcggatgcattgcgcgcggtgccggcgggcgccagtttgcaggtcgacccggcgcgcgttaccgcgggtttgctggagaatctcgatgccggcgtcaagctggtcgaaggcctcaacccgaccacattggccaagtcccgcaagagcctggccgacgcggaacatatccgtcaagccatggaacaggatggcgcagcgctgtgtgaattcttcgcgtggctggacagtgcgctgggccgtgaacgcatcaccgaattgaccatcgacgaacacttgaccgctgcgcgtacccgccgccctggttatgtgtcgttgagtttcaacaccattgcggcctacaacgccaatggcgcgatgccgcattaccacgccactgaagaagaacacgcattgatcgaaggcgatggcctgctgctgatcgattcgggtggccaatacctgggcggcactacggacattacgcggatggtgccgatcggcacgccgagtgacgagcagaagcgggactgcacccgggtgctcaagggcgtgattgccttgtcccgtgcccactttccgaaagggatcctgtcgccgctgctggatgcgattgcccgcgcgccgatctgggcggaaggcgtggactacggccacggtactggccacggtgtaggctatttcctcaacgtgcatgagggcccacaagtgattgcctaccaggcggctaccgcgccgcaaacggcgatgcaagcggggatgatcacctccattgaaccgggtacttaccgtccaggccgttggggcgtgcgtatcgagaacctggtgttgaaccgcgaagcgggcaagaccgagttcggtgagtttctcaagttcgaaaccctgaccttgtgcccgatcgacacgcgctgcctgttgccatcgttgctcacggcagacgagcgtgagtggttcaacgcttaccacactgaggtgcgcaagcgtttgagcccattgctcagcggtgccgcgctggagtggttgcaggtacgcactgcggctatctgattacctgccaggcagtaacgtgccagggcgttttggccatcaagctctaactcaacgcttcgcgcacaaattccagacggtcctgaccgaagaacagctggttgcctacaaacatactgggggcaccgaacacgccgcgttgaacggcctgttcggtgttgtccttcagggcagtcttaacggtttcgtcattggccaaattcaggatttcattggcggcaaatccgtattcagtgagtacggcagccaggacggcggggtctcccaggtgacggccttcgacccaaaaggcatggaacaggcaatcaacgaagtccaggaaacgttcaggctggtgtaattggatgccggtgaccgctcgcatcaacaccagcgtattgatggggaagtgcgtgttgaaccggagcggtacgttgtagcgccgggcgtaacgcgccaggtcatcaagcatgtagcgaccctttgcaggaacggtgattggagaggcgttaccggtggccttgaacacgccgcccaataacatgggtttatacacaagctgtgtatcggttgccgtgcacaatgccggtagctgggtgtaggccaggtaggtggcggggctgcccaggtcaaagaagaattccagggttttactcatggtcgatgctcgctgcttattgttataggggcgtgcttaccagggttcattccaggggcgcaggtccagttcaaaggtccaggcatcgcgtggctggctgtggaggtgccaatagttatcggcgatatgctcagggttgaggatgccgtcctggtccttgagtgcgtatttctgcgggaagttgtcgcgaatgaagtcagtgtcaatggcgccatcgaccacgacatgggcgacatggatgttcctgggccccagctcccgcgccatgctttgcgcgagcgcccgaatgccgtgcttggccccggcgaatgcagcaaaacctgcgccgccgcgcaaccctgcggtggcgcccgtgaacaggatggtgcctcgattacgcgtgaccatccgccttgccacttcgcgtgcatttaggaagccggagaagcaggccatttcccagatcttgaaatacttgagcgcagtttcttccaggatgctgcacggcacattggcgccgatattgaatacaaaggcttcgatcgggcccagctcggtttcgatctgttcgatcagcgcgatgacgtcttcttctttacgcgcatcgcaggcaaacccatgggcttcaccgccagcggcgtgaatactctcgataaggggctgcaacttatcggcgctgcggcgggtgacacaggccacgtagccttcgcgggcaaagcgtttggcaatggcgccgccggttgcatcacccgcgcccactactaatacgatttttttgttgtgcgtcatgggacctccctcggctcgatgatcgagcaagagtttagacgccgtgtggtgaagggtagggtttgtatctggatttaataggagcagtcagagatgactgctcaggcgattacttgcagataacgatcatgctgcggctggtgtagccggcagggttgaggccgaaggggtagtccccaggctcctcggagttgtcaccggactttgcgattactcggtagcccttggcgccacaggcgttggtcgcactggtgtagcactgctcccaggaagaggacaagccggaacagttgatatgcagcccttttttgccacgtttcacttctgtcttggtggtcgcggcacaaccagcaacggccatgaccattaacagtatcaaaattcgcttcattcctatccttaatagccgccttgcaatgccagaggccggctctactcgctctcgggtgtagcgttcgcgctgtccttgtcgaagttctccatgattgacattcgtttgcggcctaaacatggcctaaatgtgcggtaaataccagagctacattcaaacagacttcaatccgaggcaaccaaaggctttggctcactgcgcatcgtcaccgtggcacctacggaggccagaatgatgcaagtgattgccagccactgagcgagcgataagtgctcgtgcaggaataacaggccggagagcgcgccgaaagccggctcgatgctcatgagggtgccgaaggtgcgggcggggaggcgcgtcagtgcgaccatttccagggtgtaaggcagggcggtggacagaatggcgacgccgatggcgatcgggattagcgcgggagtcagcaatgcgctaccagcatggacgatgccaataggcgcaacaaacaatgcggcgatcatcaccccaagggcggcggtttggaccccgttgtcattccctgctttctggccatatagaatgtagagcgcccagcacacgcctgctcccagcgcgtaggctgcccccagcaagtcgataccgccgctggcctcgcccatcgggatcaacaagagaaggccgatgatggcgagggcaatccacaggaagtcgaccgcgcgccgagaggcgtagatggccaccgcgagggggccggtgaactccagggcgaccgcaatccccaggggcacgctgcgcaatgacatatagaagagaaagttcatgccacccaacgccatcccgtagacgatgacggtgcgtaaggacttggaggtcaggttggcgcgccacgggcgtaacagcagcagcatgatcacgctggcgaaaatcaagcgcagggttgtggtgccttgtgcgccaacgatagggaacatgctcttggccagcgaggcgccggactggatggaggccatggcgatcaacagcaggccgacagggaacagtgtcgaggccaggctgcggggggaggtggtcattggggtattcgtccgaagtcatatatagagaagcaagggcgctatgatgctcaactgtttagtgttgagcaatatattgctcaactatcctttttaatgcgtcatacagggcgaattttgagcgtttccggttctttgatagaaaaagcaaattaagggttgacggcagattctggaagtctataattcgccccacttccggcgcagtcgaaacggaaaactccttggtaaacaaagagttacgcagaattcgacagcgacttgcttc

SEQ ID NO: 2 - DNA, 86370 bp, Pseudomonas nodulensis
  misc_feature (31418)..(31493): n is a, c, g, or t
attggaaccacctgatcccatcccgaactcagtagtgaaacgatgcatcgccgatggtagtgtggggtttccccatgtgagagtaggtcatcgtcaagattaaattccagaacccctgattgctaacgcaatcaggggttttgttttgggcggtcgaaaactcaagcgctgctcatcctcgataaataccgtaccgttggggaaatcgatgcaaagtgtttctgcatttttggtatggtgcagcacattttcacagggattgatttttcacccgcaggacgcggcgtcgaccttcttcaacgagatgctgtagaaatgcctgaaccgatacccatcaaagatcacgaaaaagaaaaccgcctggtcaacaagcgcctgctcgcctgtgcgctgctggtgattggcatttcctgcgccctggtggggcgcatgtacttcctgcaggtcgtgcagttcgactatcactccacgatttccgaaaacaaccgcgtccacgtattacccatcacgccgacgcgtgggctgatctacgatcgcaatggcgtcgtgttggccgacaaccggcctagctataacctgaccatcacccgagagcgcaccaccgacctcaagggggagctggacgccatcgtcagtttgctgcatctgcccgccgaggatcgcgcggtgttcgacaaggcgctgaagcaggcacgccacccctttgtccctgtgacattgttttacgagctgaccgaagagcagatcgcgctgctggcggtgaacgagttccgtctgccaggggttgatgtagaacctcagttcgttcgccactatcccctgggcgcccactttgcgcactccatcggttacgtgggacggatcaacgagaaagaatccaaagccctcgattcggttgagtaccgcggcactcagtccatcggcaaaaccggcatcgagcgcttctacgagtccgagctgcatggtcacgtaggttatgaagaggtcgagaccaacgcccagggccgtgtgctgcgtgtgctcaagcacaccgatccgatccctggaaaaaacatcgtactgagcctcgacgtccaccttcaggaggcggcggaagaagccttgggcgatcgccgtggctcggtggttgccctcgacccacaaaccggcgaagtgctggccatggtcagcaaaccgagtttcgaccctaacttgttcgtcaccgggatcagcttcaaggaatatgccgcgctgcatgactccatcgaccggccactgttcaaccgcgtcctgcgcgggctctatgcgccgggctcgaccatcaaaccggaagtcgccatcgccggcctcgacagtggtgtcgtcactgcacaaacccgtgtgttcgatcccggttactaccaactgccggatttcgaccacaaataccgcaactggaaccacagcggcgacggctgggtcgacatggacgccgccatcatgcgctccaacgacacctacttttatgacctggcccacaagctgggcatcgatcgcctgcacgactacctggctgaatttggcctgggccagaaagtgtcgctggacatgtttgaagagtcagccggcttgatgccttcccaggcctggaagcgcgccactcgccgccaaccctggttcccaggcgagaccgtgatcctcggcatcggccagggctacatgcaggtcacaccgctgcaactggcccaagccaccgccctgatcgccaacaaaggcgtgtggaaccgaccccgcttggccaagaccattaacggcgtgccaccggtggatgaaaaccctatgcccaatgtggtcctcaaggacccacgtgattgggagcaggtcaaccatggcatgcaattggtgatgcacgacccacgcggcatcgcccgcgctgccgcacaaggcgcgcaataccgcatcgctggcaagagtggtaccgcacaggtggtcgcgatcaagcagggcgagcgttataaccgtgaaaagaccctggagcgccaccgcgacaacgcgttgttcgtcggctttgcgccggccgaacacccgaaaatcgtgatttcggtgatgatcgaaaacggtgaagccggcggccgggttgctgggccggtcgtgcgccagatcatggacgcctggttgctcgaccaggaaggtcacttgaagccgcaatatgcgacgcccgccaaagcacctggagacccgaaggtttaatcaggctttccactcgtcccattgctctacgccttcataggcaagccagggcacatcatgggccgtccagatgtgcgtggtgggcctgacgcccggatcatcatccagcgtcgctacccgcacgatgacgtgcggttgatgcccacgttctgccatcaggtgtgagccgcaacgcgaacagaaatgcctgagcttgcccggcgacgattcgaaagacgccagcagctccacgccctgggtccagcgaaagtgttcgcgcatcacgccggctgtcgcgacaaatgccgctgcatgcaccttgcggcagctctcgcagtggcagtggctgatcggcatgtccagacgcctcacctggtaccgcacgcccttgcagaagcaacttccattcaatgggtcagtcataacgtaattgccggtaaggaaggggccatcatcattgcttacaatcctaggttgcgcattggtcgatgtcgcctactgtcaatggaggaggtgacttatgcatgtattggatcgaatcgaacggaaagtcctgctcaacgcttcacgtagacaggtgtgggaagccctcactgatgccgagcaattcggccattggtttggtatcgccctcgaaggcaaagcctttgttgccgggcaagccatcgaggcacctatcacctatccgggttatgaacatgtgatctggaaggccaggatcgaacgcattctgccgcaaacgctgttctctttttggtggcaccccttcgcggtcgaggcgggcgtcgactacgaccaggaaaccccgacactggtggagtttaccgttgaagaccgtgcaccgggcattctgctgcgggtggtcgagtccggctttgacgcggtgcccgaagcacgtcggcaaaaggccttcaagatgaactcacgcgggtgggacgagcaaatgggcaacatcgaaaactacctgagccaggcccgacaggcttgaccccagcgggcaccatgcgtgatgcccgcctctttgcaccgtacttagctttcgtgatcggtggtgatctccaaggtgtcggtaaaggttaccaggacactctgcccgactttcaggtctttgaggccggcgcgaatctccggtttctccacattcaacaccttcgtcgcaccggcagggttctccagggtgacctggtttttcttcaggtcgatatgggtgatcttcagttgcacctgcacctggcggaaagctgcaccgcctgggttgggattgtcggcggtggcgcggatcacgccggttttttcgctggcatccggtgggctcttgtccacatcggtgtccagcaccgccgcaaccgagtgagtggtcagcaccttgacctggtcaccgaccttgaggttgcccaggtccttggcggcatcggtaagttgcacatgcacttcacgcccctcggcaccggccagcaccacctgatgtttggccgcatcgacggccaatacttttgtagtaacttcatcggcttccagggatttggacagcgggatatcggcggcgtgagcgatcaggttgccggcggacagaagggtggccagggcaatcgcctggcgcagggaacgggatagcttcattgaagggacttccatgtgagaggagccctgagtctagtggtgagtcagcgatgcgcaaattcgctgactcaccttggtgtaacgcgtttagaagtccacagtcgccgagaacttggcaatacgtgggtcgccctggctcaggaaaccgccctgggccgattcccagtacttcgcgttggcgacgttctccacggtggcgccgagggtgacatcacgctgggccaccttgaagttgtagcgcgcgcccacgtcgaagcggttccacgtcggcaagctcaagttgttggcggcgtcggcgtactgcccgcctgtgcgcaaccagcggccattgagggttacgccttgcaggccaggtacatcccactccacatcggcgttgagctggaacgaaggtacgccgattgcgcggttaccgtcattggcgccgttttgcgtgtccttgagttcggtcttcatcaccgtcacaccgcccagcaaacgtaggccgctgaggggttcgccgaagacgttcagttctacgcctttgttgatttgctggccttcacgcacatagcgcgctgtagtcgcatcgatgacctgaacgtagccggcgccaggctgttcgatacggtatacacccagcgttgcgccataggtgcccatgtccactttcacacccgcttcgatttgtttggagcgagcaggcgcaaacgcctggccgccgccgatgatcgtccggttgcccgagttgaccggcgacgtcgggccttgcgccaggccttcgatgcggttggcgtagaaagacacgtgttgccacggtttgaacaccaggccgtagactggcgtggtaattgactcgtcatagttggaagtgcgcgtaccgctcatgtagttgtaagcctgtaccaccatctgctggcggcgcgcgcccaacgtgaccaacagacggtcatcgaaaaagcccagggtgtcggacaccgctgcgctgcgcacgaatgttttgcctgtaatggtcgggtcgctgaaatcagtgcctggcgtattgcgcgggttgttcagggtgggcggagcgccggtcacagggtcgtagatgttggttcgggtagccgtcgacgaggcgttgaacacataggcattgcgtgcttgagtccagataccggccaggccaaagttgagtcgatggctcaaagggccggtctggaaactgccgttcaacccgcccattaagctgcggttgtcttcttcgtgggcgatggtcgagcggcttgccagggcattaccgctgttgtcagtcagcgtgaccgacgagtagcgccccatttcccgggtgtgcttggcaccgcctgctgcataggccgtccagttgtcgttcaggtcatactcggcgcgcagcatgcccaaggtgtcttcgaggttggtgctgctccagctcggcgcgtagttggtgtcggccgaaggcgcatccggcacatgggtggccgtgcccaggaataccgagttacgcccgccattgatgtgctgcttctgatacacaaaatcactggacaggcgcaacgcatcaccgcggtagtccaggcccacggtgaacagcttcgagcgctgattttcatcatcgatgccggtatcgccttcgcgctgggacaggttcacgcgtgcaccaaactggttgtcctcgccgaagcgctggccaatatccagatgctcgcccacccggccatcgctgctgatatcggtactgaagcgacgcagtggcaggtcatcggcgcgcttgggttgcaggttcacaccgccgccaatccccgagccggtcggtgtcacaccattgatgaaagcattcggccccttgaacacttccacacgctccagggcgtcggtggacataatctgacgcggcaggatgccgtacaggccgttgaaggacatgtcgtcaccggcgagcggcaggcctcggatcatgaacgtctgtgcctggttggcatagccagacgcctggcgcaccgacgaatcattaagcagtacatcgccgatcgtttcggcctgccggtcgcgaatcaatttctcggtataggaggacatgctgaacggcacgtccatgatgtcctggttacccagcacccccaactgagcgccacgtgccacctggccgccagcgtataccgggggcagggcgcctggcgcaggggcgtcggcgctgatagtggtggcgcccagttccagcgtgccggtttcctggctagcgtgagccgagaggctcagggaacagcacagggcgagcagggtggggcgatacggcacagcgaatgggatacgggcgggcatggtcgatcctgacggtgaaccgtcaatggtgagggaaagggcaacgatggttgcgcttcctcactgcgcggatacaactccggtgcaaatgatagtaattattattaacgtcgtgcaacaattttgtgagattaaggtctgcgcgcatcgatgccgagtagaatcacgccctgaaagcgattcctgaggtgcggtacggtggatttacagcagggttttgtcctgacccggcattggcgcgataccccggcgggcacggaggtcagtttctggctggccaccgaccagggcccgaagtttatccggctacccgtgcagacctcggtgatgttcatccccgaagcccatcgcaagcctctggattggctgctcaagggcgagcgcgatatcgaactgcgcccgttgcagttgtgcgatttccatcaccgcccggtcctgggtctgtacacccgccagcaccgccaagccatggacgtagaaaaacgcctgcgcgctgcgggcgtcgacgtgtacgagggcgatgtgcggccacccgagcgctacatgatggagcgcttcatcaccgcgccggtgtggttcggcggcacccccgacgctaccggcgcactctgcgatgcgcagatgaaacccgcgcccgactaccgcccaccgctgaagctggtgtccctcgacatcgagaccaccgcccagggcgatctctactccatcgcccttgaaggctgcggcgaacgccaggtgtacatgctcggcccgccgaacaaaaccgatgcggtcgacttcaaactcgactactgctacacccgcgcgcaactgctcgaacgcctcaacgcatggctcgccgagcacgaccccgacgcgatcatcggctggaacctggtgcaattcgacctgcgcgtgctacacgaacatgcccagcgcctcaacgtgccgctgatgctcgggcgtggcgacgagccgatggcctggcgcgaacacggcagccgcaaccactacttcgcggcggcagcgggacgcttgatcattgatggcatcgaagccctgcgctcggccacctggagcttcgagtccttcagcctggaaaacgtcgcgcaaaccctgctcggcgaaggcaaggacatctccacgccgtaccagcgcatggacgaaatcaaccgcatgttcgccgaggacaaacccgccctggcgcgttacaacctcaaggactgcgagctggtcacgcggattttcgccaagaccgaactgctcaagttcctgctggaacgcgccagcgtcaccggcttgccggccgaccgcaacggcggttccgtcgccgcgttcacccatttgtacctgccgttgatgcaccgccagggctttgtcgcgccgaacctgggcgacaaactaccccaggccagcccgggcggttttgtcatggactcacggcccggcctctacgaatcggtgttggtgcttgattacaaaagcctctacccctcgatcatccgcagcttcctgatcgacccggtcggcctgatcgaaggcctcaagcaccctgacgacagcgcatcggtggaaggctttcgcggcgcgcggttttcccgcacccgacactgcttgccttccatcgtcgcccgggtctctgaagggcgcgaagtggccaagcgtgaacacaacgcgccgctgtcccaggcgttgaaaatcatcatgaacgccttctacggtgtgctcggctccagcggttgccggttcttcgatacacggctggcgtcgtcgatcaccctgcgtggccaccagatcatgcgccagacccgccaactggtcgaagcccaaggctacgaggtgatctacggtgacaccgactccaccttcgtctggctcggcaaggcgcatagccaagcggatgccgggcgcatcggccaggcgttggtccagcacgtcaacgactggtggcgcgagcacctgcacactgagttcggcctgcaaagcgccctggagctgcaatacgaaacccatttcacgcgcttcctcatgccgaccattcgtggcgcggaggagggcagcaaaaagcgctacgccggcctggtggtgcgcagcgatggcagcgaggacatggtctacaagggcctggaaaccgtgcgcagcgactggtcgcccctggcccgccgtttccagcaggaactctaccagcgcatcttccatcgccagccgcaccaggactacattcgcgactacgtgcgccgcaccctgagcggtgagttcgatgagttgctgatctaccgcaaacgcctgcgtcgccggttggacgactacgaacgtaacgtgccgccccatgtgcgcgccgcgcgcctggccgatgagtacaacgaccgcctgaaccgcccgtgccagtaccagcgcggcggctggatcagctacgtgatcagcgtcaacggccccgagccgttggaggtgcgacaagcgcccatcgattacgatcactacgtcacccggcaattacagccggtggccgatgccatcctgccgtttgtgaatgatgatttcagcaccttggtcggcgggcaaatgggtctgttttaaaacgcttgattcgtccgtgtgcgagcctgcactcttggtcactgacgaccaccctgacggcgcagtccccatgaccgaatttaccctgaccggcaccacggtcgaactcttgcccctgcaacgggcacacaaggccgccttgctcgaggccgccgccgatggcgaattgtggaacctcaaggtcaccaacgtgccgggcccggatacggtcgacaagtacatcgacaccgccctggccgggcgcgatgccggtagcgtgatcccgttcaccctggtgcgccgagacaccggccaggtggtcggtagcacacggttctggaaggtcgaccgggtcaatcgcaaactggaaatcggccatacctggttggcgctgtccacccagaaaagcgccatcaacactgaagccaaactattgctgctgacctatgcgttcgaagtgctcgactgcgtgcgggtgcaattcaccaccgatgaactcaacgaaaagtcccgcgccgcgatcctgcgccttggcgccgtgcaggaaggcatcgtgcgtcacgaacgcatcatgcccgacgggcgcaagcgcaactcggtgcgcttcagcatcatcgattcggaatggccgcaggtaaaagccaacctgcaggccaaactgcaacgctagaagggaaggcccatgtacatgctctacggcatcgacgaatccggctcctgcatgatcgaaatcgccctgcagcgctgtgcggtgccgtggcgccgggtcgacgcagcttcctgggcagagggcgagggcagtgacgagctggcccgcatcaacccgctcaaacaggtgcccaccctggtgaccccggacggccagttgctgacggaaagcgcagcgatcctgatccacctgggcctggaatttcctgcctcccacctgttggccggcaaccgcgcgcagatcattcgcggcctggtgtatatcgccgccaattgttactcggcgatcggcatcattgactacccgcaacgctggctcggcaacgtcaatgaaaccgtgcaggcgcagcttgtcacgggtacccgacgttatctgcaccaggcctgggtgctctttgccgaccagtttgccgagcaattgtttgcgccggacaacaccccgaatgcactgggcctgatggcggccgccgtgtcgcgctgggacgaagcacgggacgcgttgaacggcctggcgccaggctttgcccagagcctggcgcaggtggatgccgaccccatcgtcgcgcccgtatttgctcggcattggccgcagtggaaggtctcatgatgtttccgcaatcagtggaaacaatgacagccgcagcctccaaacccttgcgtagcgggcgtcctgacctacgctttcttaaagtgatgtaggaatcatccttgaatttgactgtcgcagacatgaaactcaagaaccctgcatggaattcaaaggaggtgcgcatgctcatccggtcgctgaccctggctaccttgatggcttttacggggccgctgttggctgctgatgatatcaacccgctcaagcaggacttgggcaaggcccgaccgctggtggtggtggagcttgattccggcaacgccacgttggccgagctgaagaaacagctggacgagcctgcgaccaagcagtcctttgaagaacgcagcatggtgttctacaccgtgaagttcggcagcatcggtgccgaaggcgagaagttcgccaaggaccccaaggacagcaagaaactcaccccgccggaaaccaacgcgctgatccgtgccctcaagctgggcgccggcagcggcaccaaagtgatcctggtgggcaaggacggtgagaagaaactcgagaagactgtaccgccggataccctcgacctgaaggcgttcttcagcgccatcgaccagatgccgatggccgagaaagaagccgccgccgctccggagcctgaacccgcggccccggcaccagccaagggtgccaaacctgccaaacatggcagcaagcccgcaccgcaacagctggatgactgaacccaagaccctgtaggcgtgagtgcctacagggttttttgtggtttgcgcaccggaaacggaaagtagaaaaaccgcaaaaacgccacccgcttgatcacttccccgatcaacaacggcaccaccactgccaccacaaaacccatgcaggccgcgacaaacgcgtgcagccccaggcgctccagcaggtcaaccgtcttgtgctggatctcgccgtggaagatcagcaggatcaacgtgttctggccaatgtaggtcatcgcccgtgtgataacggtcgacaccatcagcacccgcgccagtgaccagcacgcgtacaagccgatcaccgccagcaggctggtccacaaccagtggtcgtagcggcgctgcgccaggtccatggtggaatggctgtagaggaacaccgcggcaaacaaggacaacgaaatcaccagcgcgagcaatgatccctcgtgccgcctcagccagtcgcgcagcaggtagccgcagatgaagtaagtgctgctgatcagggtgatttccaggccgaagggcaggccgggcagtatccaggtgtgcccgccgacggtcaccggtatttgccagaaccacggcagcacccagatgccgatcaacagttgcacggccatcagcaggcaactcaccggcagagacagcttcaggcgctggatcaggcgcaacatgacccaactgaacaggatggcgacccagaagtgcggcagaaaccacagcgcctgccaggggatggtatccaccgaggcgtacaacacgccgccgacatccggcagcagaggttggccgcgcagtatgtcgcgcaccagtacgtacaccagcatggtgaagaaaaacggcttgagcaggccatcggccttgcgcacggccatctccacaaacggctgttcgggtttgaagaacaccccggagaggaaaaaaaacaacggcaggatgaacgaggcgatgatcgggtactgcaactccagcgagttcgccacgaaccaactgtggccatacacgatcatcaggatgccgatgcccttggcaatgtccatttgaatccagcgatgcttcacctgaccaccctccctctaaaaaccgcacccacagaaaacctcacgccttgcgccacggcctcagccacagccccatccccagcaacaccgccgcgccggccagggtgctcagccccagttgcagccacacgccttcaacccgaaacagcgccaacgccgccacgcccatcagcaccgcgctgagcagccagctccgagcccagggcagggcgccgagcaatgcctggcgctgcatcagcagcaacgcggtgcagagcactccggccagcgcagccagcggaatcccggccaggccgaacacaaacggcagcacgcccagcaacgccacattcaccaggctgccgagcagttcacaccgcaatggctggcgcgtatcgcccgcagcgtaggcatagcgtgcgagcaaggcgttccaggcgccgaacaccaacggcacggcaaaccaggccagcagcagcggcaacggcgagtccagcgattgtttgggcagcagcaacgccaccaggctcggcgccgccgccaccaggccgaccccggcgggcagggtcagcacgctggcggtttccaggccacgcttgagcagggccaggcgctcatcgccctggcgccgactcatcatgcccagcaacacctggttgaggctcatcagcgcaatcagcggcaggttcatcagcttgcgcgccaggttgacccaggtcaccgcaccttcccccagcaaggacgccaccagccgttcgatcaaggccaggccctggctggcgccgttgctcaacagcagcgggccgatgcgctggcccaactcccgcaggggcgcccacgaccgctgccaatgccacggtcgccagccctggcgccacatcgacggcagcaacgccaacggcatcaacaggctgccggccaggcaggccagggccaatgagtgaggttcagtggcagtgccggcgaaggcgaggtaggtcaccggcggcaggttgaacagtaacgagcccaggcccgccagtacaaagcgctcgctggcttgtaacggaatgctgaacagcgcatgcagaatcagccccggcacgcaccaggcgacaatctgcaagttgctgctggcgagcgccgtggcactggccgccaggcccggcccgagcagttgcaccagccacggcgccaacacggtcagcagcaggctggtggccagcgcgaccaacagcaacgccgggaacagtaccgcgagccagcccagccgctcgtcgtgcttgcgcgccaggtacagcggcagcgccgccgcactcagcacaccgccggccaacgacatgcgcagcgcctccggcaagaacagcgcgatcaggaacgcatcactgcgctcgccggcgccccaggctgccaccagcaaccattcgcgggcaaaacccaggcacaggcccagcagtgtcgccagcgtcagccatgcggcagagcccagcatcagcgctgtacgccgtcgagcagcgatttgcgcgacgttatgctttttacctgcggcaggcgcgccggaaacagacgccgcgcttccagcacattaatgcccaccatcagccagaacagcgcgaccatcaccacggcaaagctgaagtagtggtcaaacaggccgctgaccagcgccgagagaatcccggcggtggtgcccagccacagcgcgttgtccttggtcaggcggatcgggccgttttccggacgcgcttcacgccaccagcgtacggttaccgccacgaagaacagcatgccgacaatgccggtcttgtagatgaagttcagccacaggttggagatgcccagcaagtgcgtgtcgggtacgggcgggtcgaccttgaagccgataccgaacgggtacgccgccaccgcctgcggaaacatgcggtactcgtcgaaacgcacttcggtactggcattgctcgacgaaaaaatcgtcgccaggcgctcctgcaacggcggatacgcgatcaccagcgccaccgtcagcgccgcgccgatcatcagcaggcgcccggtgtacggcactcggcgcgtggccatccacagcagcaccaacgccaggctgaccatcgcgccacggctactggccagcagcaaggcggcggcgcccaggcacgccacgcccaggcccagcgcgcgtttccagccttgctcggtcatgccgaagcagaacgccaggggcagcagcaacgccatgatcccgccgatggcattcgggtgcatccacggcgagcccatgcgcgacgacatcgcctccaggccgaatttgagcatgtcgaagttgccgtagttgaacagcgccagcaccggtgcaatgccggccccggagcgtgtgcgcacgaacaccgcaatcgacagcaccagcatcgccaggctacccagcagcagggcgatcaccagggattcacggtgcttgcggtccaccagcaacttggcgcagaggaacaccgccgacaggctcagcaaccagcgcagccagttggccacgccgctggtgtcggcgtgaatggtgacctggccgacgatgaacgggaacacgctgaacagcatcagccacaacagcatctggtcggtggggcggcgggtgaggcttggcgtatccggcaggcgcgccaggaagttgtgccacagcaccgcgccccaggtcagcgccaggatcgcttcgctgacggtactgcgaatgcccaggttgattgtggaatacggcatgaatgtggcgaccagggcaaacagcaccaggccccagaatggaaaacgcaggatggtcaccgcaccggccacgccgatcacggcgaggaacgccttggccggcgacaacagcagggcgacggcaccaaacagcaggccgaagaggatggcgacgaggctgggcaggttcacgttcacttcagctcctcgatcagttcggccaggcgcccgcgataggcgcgatggttaaagcgttctgcccactgccggcattgttcgggcgattcatcggcggcccgctcgccgaggctgatcatcagctgcgtcagcgctggaccatcggtgggcgaaaagcgcggtgccgacggcggggtgatttcatccagcgacgtgccgctggccactgccaccgaggtgccgacgctcagggcttcgatcaccggcaggccaaaaccttcggcgtaagacggttgccacaggcgcgaagcctggcggtacagcgcatgcaattcggcatccgacacaccgctgagtgcacgaatcccaggcaggctgcgctgagcttcaggcaaatgatcgaggctgcctaccagcaccaactccggcacgctgggggactggcgccgcgcctgctgccaggcctccaccaggaacggcacgttcttgcgcagctcgcgggtgcccaccagcaaccaatagcgctcgggcaattggcgcgggccgaggtccgccgccagttcggtaaagccgtcgacctgattgggcagcacgcgaatcttgcccgcggccttgggaaacaaccgcgcggtttcatcggcgctgtactgcgacggcgtccacacccggtcggcgctgtgcaccgcgtaggtgatcgacaggcgatcgctggtcttatagatgagcgccttcaagcggttggcgtggtagttgttcaaggtgatctggaacaggtcatgcaacagcaccacggtgcgcaggcccttgggtttgggcggcaacggcaggcccatgttgaaggtgctgatgtacaggtcgatgtggtgctcgcgcaacgcccgtggcagaaacccggcttcgaagcgcaggcgattctgcggctggtgcatggcggtcttggcgcaaccccaggccgggcagtgcgcctgcaagcgggtttcatcgcccaggggcgccacggtaaaccgctcaagctcgatgccgggcagaccgcgcagggcgctttccagtgcatacacctggcggctgatgcccgattgcggcgaggtgccgacggtgcggtaatccaggcctacacgcatgcgggctccttttgattctggggcgaaagggtcgtgtagaccttttccagctggctggcggcgacgccccagtcatgggcacgacgcacataggcgcggccggcttcacccatggtcgtggcggcatcgggaaattgcagcaggcgcaccacggcatccgccaggctcgcagcggtctgcccgccgaggtaatccaggccttccaccaggtccaatcccgatacgccttgctcggtacttgccagcggcaagccggcggccaaggcttccagtaccttgagcttggagccgccgccatggcgcaacggcgccaggaacaccgagcagctcgattgcaggctcagcaggtcgggcacaaaaccctgccactcgatacgcgggtccggccagcgtgcccgccagctgtcgggcatgccgaagccgcacacgctcatgcgtacgtcggggcagcgttcccagacctggggcaggatctcatccagggcccactcgatggcatccacgttgggcgcgtattcgtagttgccgaggaacaacacgcggcgggtggttgggtcagggcgggcggcggcgaagtgatcgcagtccacgccgttgaccaccaccgacaccggtttgccggcgattttccccagtacctgtgcgtcgctgtcggttaccgcgatcacctgggcggcctgacgcatcacgcggcgttcccagcgggcatagcgccattgatcgtagcgaatgaacggcagcgaccagcccggcaaacggtcatacgtggcggcgccaagggccgattcaacgttgtgttccgtcagcacaaagggttgggacttgcgcgccagcacctcttcatacggctggaagctgtagctgtgttcgatttgcaccacgtcccaagggtcacccagcaaccaattgaaggtgtcctgcaattcacccgacaaaccattcacgctggccagcagcgggtagggcgcaaacagtccggccaacagggtcgtcacgctgcgcagagggcggcgcggcaggatgatcagttgttcgagaaacgcttccagcacctggcggtcggtaagcgacaccgggtgtttgtcatgcagcagcagggtgatccggtgcccgcgcgcggcgaggttgcgcagcagatggaactggcgcgtcttgccgccgctggtggcgggccagggtgaatagggcaggatccataaaatgcgcatggcaggcctcagtcccataacagaatttgcaggttcgacttgaccggtacggtcaggccgctggtgccgcttaccggggtttgtgtgccgcgcagcgggtcgtacagggtggcgctggccaggcctggcaagtgggcgttgccgccctgggcggcccagaagaaccacagcttgcgcccgtcggcgcgggtccaaccgatgctgaacaggccgtcgggcaactggtcggcaaccggcggatcgcccggcgtgagcgtcggcccactgacgtcgaggaagttcttcaaggcggtgtagacgggcttggggttggtgtcgatatccagcaagccgtaggagcggtcacgcacgctggcgcgctggtcgaggtcgctcagggtgaacaggaagatcttgtcgaaatccatcgcactcatcagtgccaggcggcggaccacgtagtcggcctgggcctggagggtgatgatgtcctgggcgtccttgggccccttgtaggttgaccagccccactcggtgctccacagcgtgttcacgccgccgttgcgcagggcctggttgagctgggtggtcttggcgatgaagtccaggttggccgggtcgttgccttcgggcaattgggtgtaggggtgataggaaatcacggtattgaggctggccacgccgagtgcgcccaaggcgtcgaacatggtctggccatcgggcatttcgctgaagaacgccatgccggcggccactaccggtttgctcgggttcacggcgcgcaaggcgttggtggtgacgctcaacagattcgcatacccggcagggtctgccgccgggcgccagaagccgatcaggttcggttcgttccagacttgccaggcctcgacgctggggtagcgctgggacagcatggccatgcgattggcgaacacgttggggtctttcggcgggtactggtccgggtacaacgacagcggcggggcgctgctgataaaacgcgccgaccccaccaggtaaaacaccgacttgatctggttctgctgcagcttgcccaccagctcatcgagggtggcgagcttgtattggttctgcgcggtttccagctgatcccaatgcaggtccaggcgcacccactccaggcccaaggccttgaggcggtcgatctgcttctggtagcgctcggggctgaaccacaggaactgcgcattcacccccaggaaatctttccagaccacctccttgctgcccttgagcacatggctttcggcatccgcctggcgtccccacaagaatgcggtcaggcccagggcggcgaccaccgcgagggtggcgaggtaggtgcgtttacgcgccataaggggctccgctgatggcctgctcgaagagctgcttgaatttctgcgcggtcaacggccacaaccgttcgcggccaatttccccggcgcgttcggcccaatcccgggccagcagcggtgtacgtgccagccgcagcagttgttcgccgagcgcggccacatcaccctcggggtagatcgcgccgttaccgctggcgacttcctcggcaaatgcgcgcgcgtcggaggtgatcgcgccgcgcccgcaggcggtggcccaggacagtgcgccactggtgccgcgctggcgtcccagcaggccgagttttttcgattcacggtagggcagcaccatcacgtggtgcgcctggatggtctgggcgatttcatccgccggcaggttcaggcgccagtcgatggcgtcggtcaggcccagcgcagcgatctgcgcatttaactgctccaggtaattgccgcctgcgccaaatgccatttccgcggcggtgccgccagccagagtcaggcgcacgcgatcgcgcaattcgggggcttgcttgaacacatccgccaaggcctgcaccaggtcttcgatgcctttgccccggtagataaacccgaagtacagcaggcgcagcgtgtcgagggtgggtaacggtaccgctgggatcggcaggttggcatggttgatcaccgcgactttgccggccggcagttgcatgcgctggctcaggcagtcggcacccaggcgggtgagggtcaccagccgggtcagtgccttggcgacctggcgttcttcacgcagggtcagtgggtcggccagcaccacggcggcctggggcaaggggctgggcagacgttccatcaggttcaaggggaacggcaggtgctcacggcgccacaccatgcgttccgggtcatgcacggtcgcggtcagcggcaaccgggggtaagccttgcgcagttcacgcaaggccaggaattcccccaggcgcccgccgcccagttcggcgtgtaccaggtcgacggcctgccagtcgaacgcgtcgatggcctgcttgatcgcttcgctgttgcccgccaccccggccaacggtgtcagcaccgtcacaccgaggtgttccaaggccgtgcggaaatggttcgcgtagtcggcgatcccgtttttctccggcggcaagggcgcgagcagggcgatccgcatcagaacgctccccggtacttgccgatggtgcgcagcactttgctcggcacttcaaacttgcgacggttgatgatgatgccgtccaccttgccgaacgcggtgttgaggatcgacagcgcatgctccaccaccggcacggtacttttgcgcgcttccaccaccagcccgatcaggtcggcgcgacgcaggtcgacgaacgcctcgcggttgtccagcaaggccgaagcatccagcagcaccacctcacccggcgcagcggtttccaggccgccgacgcgcacgttgatgccgttttcactgagcaattggcgcagttgctcgaccacaaaggtcaccccttcgccatggcgcgccgaggtcaggcccagggtcacgccctgttcggcaatgcgctcgggctgcagcaggctgtacagccggtagatgctcgcattgaacgcgttggtgctttgcgcggtggaggtgtccagctccggcagggtggtccacagcggcaggccgaacttgcgctccaccaggccaccgtcgtgaatacgctggtcgagcaggtagcacaggtagatcaccagcaggccgaccacgatggcgaacgggatcgccaacaccagcatcaccagggttttcgggaagatgcggcctgggttcagggtggcttcttcgatcacggcgatgttgctgatctggctgttgtccagctcacggtcgatgcgcgatttttccaggttatccacgtacagcgcgtagttgcgctcggtggtgttcagctcgcgggagaggcgggccagctccggttcgatctccagggcctgcttacgttgctcctccaggttcagcagttgtttctgctgttgcaccagttgggtacgcagtgccacgttgttgctggtttcatccagcaatacgcgctgcaagtggatttccagggtgttcggcgcacggttctccgaggcttgcaccgtgttgctctcgctgttgacctgcatctgcatggcccggatcgacgcgtccagggctttgaccggcggcgcgttgtcggtgtaggtgcgcatcatgtcggccttttccagcagcttctggttgagcaggcgacgcaagtcctgctgctgcgggttcagggcgatctggcgtacggtggtgacttccttgggctggcccttgagctgggtgcgcgtgctctggatcgcgctgtcggacgaggcgatcagtcgcgtcgtgttgaacgtctcaccgcgcagcacgttgatgcgctcggacaaatcctccaggcggtcggtgatgctcgccgcgccgatctcgttcaggtgcgtgaggatctgctccttgtagctcttgatctcggtggcgctgttggccacctggccttcatagaacgcgtacaggctcttgcgccccagagcctcggtacgttcgttgatgtaggtctcgacccaatccttgaccactgcctgggcgatttccgggtcgccccacttgaagctgatgtccatcaccgtggaaccggcggcgtggctgacttcgaagttcttctccaggctggcggccaggcgttccaccggcgtggttttttccacgacaccgacggtttccagcaccacgcgcaggccatcgaacaccgcgcccacgccgctcttggcgtagtacttggtgcgcttccagaaaccttccggcggcggcgcgttctcgatcacttccaggtagtgctcggccaccgcacgcacgatcggccggccggtgagcaggcgctcttcgtcgacaatcgggtcgcgctgggtactgggcatcaccagcgcctggcggttgctgatctcgataggcaaggtcgagtcacgccccggcttcaccaacaggcgcgcggtggactcgtacttggccggcagcaggaacgcccccagcaggatgatcaccagcgccgcaatcgccgccagtttgaactcatgccggaagatgaagaacaagcgcagaagatcacgaaaagaacggatctcgatcattgggatgtcgctcctttagttgttgccgccgctggttcgggtgtagttgtagccaaccccgatcgacttggtgaacgggatcagttggttcatgtaggtatccaccccttggatgcgctcgcccacgttggacttgggcacgaacaccacgtcgccgcgttgcaggcgcacgggtttgcgcccgttggggccggtcttgagcagttggctgaagtccaggaagtacgcgcgataggcaccctgggcgtcttcgcgcagcagggcgaccatgctggcgttgcccgccgggctgaccccgccggccccgatgatggcttgttccagggtgttggctgtggcgatctgcaccgccgtcgggttgttcaccgcgccgccgacgatgatcgagccgctcggtgcctggttgatgttcaccgtcacccgcggttcgcggtagatgggcgcgagcttgccggtcaactccgtggccagttccgacggctggcgaccggcgacctgcaccggccccaggaacgggtagttgatcttgccgtcggtctgcaccgtgtatagcgtcagctcatagatggtgctgacgttgaacgccgacagtgtcggcatctcgccggcatcgcgcacgatgcgcaactggtcgccgatgcggatgcgttccaccgccggcggcaattgcgccagctggtcgagggcgcgcttgccggcctcgacggtgtcactgtcgggcgggacgatgcgtgccggcgtgttgcaggcggccagggccatcatggccacgacgagcagggttcgtttcatcaagggggacttcctgtaggtcatgatgctcacctccaataaccgggaaacatgctgatgcgccgcttgagggcgagggggaggcgacgctccagttgacccagccggtagccgagcagtttgaacgcactgcgcaccagtacttcgggaacacggtgcagggcgccggccttgcgcaaggccgccagttcagccagcacgtagcgtttgccttcgccacctgcgtcgccaaaggcctgcttgatccatggctcgcggccgtagaacacgccgatgtcgaagtagcggtgaaactcatccatgagtttgtaatcgtgggagtgatgcaccaatgccgtggcggcatagcgcaccttgtagccatcgagcagcatgcgcgccgccacgtaggcgtcctcgctgccgatcacatcggccgggaaaccgcccaccgcctccagcacgctgcgccggtacacggaaaacgagtcggaactgaagcaggtcttgatccccagctccggcgcatcggccaggcttttgctgcggctgtgttcggggtagttgaagtgccgcgactgcgcacccagtactccggcatcggggtgcggcaactggcgaccgtaggccacgccgttgagcgggtcctgctgcaattcggcgagcaggttggcgaaggtttccggggtggcggggatcgcgtcctgggtcatcacgatcagcgcgtcgccgcccacctgttcgctggcccagcgccgggtgccgccgtggttgaagtcacgtgcgtcgatcacctcgacccgcgccccgaattcgcgaaagcgcgccgcggtgtcatcgttggaggcgctgtccaccaccagcatctcgtcaggttgcagggtttgcatcttcagcgccggcagtaggcggcccagatggctggaggcgttacgggtcgggatgatcagtgaggtgagcatgtcatttcttcacttctgcgggcgcgcgcccgtagatgtcgtcgaagcgcacaatgtcgtcctcgcccaggtactcgccgctctgcacctcgatcatcaccaggtcgatgatgccggggttggtcaggcggtgtttgtgcccggcggggatgtaggtggactcgttggcgttgatcaggaattcacgctcgccgttggtgatctgcgccgcaccgctgaccactacccagtgttcgctgcggtggtgatgcatctgcaacgacagcgacgcctgcggcttgaccacgatgcgcttgatcttgaagcggctgctttcctccagcacggtgtaggtgccccacggccgggtgacggtgcggtgcaggctgtacgccgggtggttctggcgcttgagctcggcgacgatgtagcgcacgtcctggctgcggtgggcgtcggcgatcagcagggcgtcaggggtgtcgacgatgatcaggtcgcgcacgcccacggcgccgagtacgcgcttgggcgagtcgatgtagcagttgtgcacgtcatgcagaatcgcttcgccattgacctggttgccatgggcgtcgctgggggtgagctggcgcagggcttcccacgagccgatgtcgctccagccgatgtcgcagggcaccacggcgacttgcctggacttttccatcagcgccacgtcgatcgacacatccggcgcactgccgaaggcgtccgcgtccagctcgcgctggcgtgaggtcttgttctgcaggtgctggctgtgctccagcgctgcgcgggcagcgtccagtacgtccggtgcatgggcggcgagttcgtccaccagggtgctggccttgaagcagaacatgccggcgttccacaggtgtttgccgccgtcgaggtagccttgggcggtggccaggtcgggcttttccacgaagcgcttgacccggtagccggtgcccagcgcctcgccctgttcgatgtagccaaagccggtttccggatgatccggctgaatgccgaaggtcaccaggtagccggcttcggccaggtcgcgggcctgggtcacggcctcggcgaacgccacttcattgaggatcagatggtcggcgggcatcaccagcaactgcgcgtcaccgccgaaatgttcctgcacatgcaacgccgccacggcaatcgccgccgccgtgttgcggccgaacggctccagcagcaggtccaggggcaggtgggcctggttgaccaggcggtagtcatccagggtgcggaacagcaggtcgcggttggtcactgtcaacacgctttccacgcccggcagcttggctgcgcgctggaaggttttctgcagcaggctctggccgtcgcgcatgcgcatgaacggcttgggcatgttctgccgggacaccggccacagccgcgtgcccgaaccaccggaaatgatgcagggaattaatccgttgagtgtgttcatcaatagacttccttggtggaaaggacggccgggaccgtcatgaagacgatgtacaggtcaaaccacaccgaccacttggagatgtactccaggtcgtactcgacccgtttctggatcttgaacagggtgtcggtctcaccccggtagccgttgatctgcgcccagccggtgatgcctggcttgacccggtgccgcgagctgtattcgctgaccgccacttcaaacggaatgcccgcggccttggtcgcggtggcatgcgggcgcgggccgaccatggacatgttgcccagcagcacgttgaacagttgcggcagctcgtcgatgctggtcttgcggatgatgcggcccacgcgggtgatgcgcgggtcttcgcgggtggtctggcgttcggcggtgaagtcgctctggtcgttgtacatcgagcggaacttgaacacgcggatttcgttgtcgttgtagccgtagcggttctggcgaaacagcaccgggcctttggaatcgagcttgatcgcaagcgccgtcgccagcatcaccggcgacaggcataccagcgccaggctggccagcagcaagtcctcgcagcgcttgatcaccggcgaccagccgcgcagcggcaactgcgaggtgttgaacatcaggatgccgcccacgtcggtaatcttgctgtggccgtagcgcagggcagccatgtccggcaccagcatcacgttcaccgacagctgccgcaggcggttgaccaaaccatggatgcgctgctcggcggcccagggcaggcagatcatcacttggttgacctgttcggcgcggatcagtttttccaggtcgcgggtgttgcccagcaggggcaggttgctcagttccttgggaatgcgctcggtgcggtcgtcgatgaacccgaccaggccggaacggatgtcaccgttgcgcagcaggtgatcggcgacgtgtacggcggtgtcggtaaagcccaggatcaccgtgcgttgcaggaatttgccggcacgcatcagcttgcgatacaggcgcagcatcagcaggcgctccaggcataacagccccaggctggcgacgtaccagaccgccaggttgcgcggggtcaattgcgggaagaactgcaggatctggtacatgaacagcaggatgcaaaaggctgccgtccaggccttgatcttggttttcaggcgcaggcgattactgaacagttcctcggaatagatgcccagcgcctggaacagaataatggtgaggaccgcaaaaaataccagcaggcccaggaagtgggcacgcagctcaggggccatcgggtcgaggaaaagcaccaggaccagcgggggcagaatggccgtcaggccatggaccaacttgacgaaaacaacaaagaactcaacaaaaccggcgcgcgttaagaacaggctgtcgacggacgacttctctcgcatacaaacatccctcattgcactccagccttcactgttcgacggtttgttcaataagcgctggcttgctttagaactagggtcgaacgactacgctgggtaatacgcaactagccattccaaatgcggctatccatttgactgggttttgcggggtagtgactaaaggagtgttcctttgatgtgtgttcagtcaacgaattgacagtggtgcggaggcggcatactagacaggttaatcagtcttttttgcggcattttattgacattccttgtccgaacactcggtgattgggtgtgtttttgagtgtaggaacaaatgtcagatttttcctgcttaaaggaaaaacctttttcaaagcgaggtaggaaagggggacaaagagggagcggcagggcgcactaagtgccctgccgccggggctttcatcggctcagaagttgcctttcaaactcacggtaaaattgcgcggttcaccgtagaagttaccccaggaggcggtaccgaccgtgttgtaataacttttatcgaacaagttgttgccgttgagcgccacggtccaggtgtcatcgaggcgatacgccacgcgcgcgttccaggtggcgtaaccggcctgttccagtttgatggtttgcacgcggtagttgctgctctgggcattgactccggcgcccacgctccatttcgacagtgcgccatcgagctggtagtcaccccacacgcgcagcatgtgtcgaggcacataggtgttggagacgccgccttcttttgtgctgtcaatggtgttcagggatttggtctgggtgtaggtgtagccgccgaacagttgcaggcgctcgagcacttcaccgctgatttcggcctccacgccttgggcgcggaccttgcctttatcggtgtagcaatagccatcggcagaggtcgggcagaagctgttgtagtcggtttcggcgccgtttttctcgatggcacggaacaatgccagggagctgttgaggcgcccatcgaaccattcgcccttgatacccagctcgtagttgtcgccgattttcggcttgagcgccgcgccatcggccgtggcatatgagctttgcggctggaagatatcggcgtagctggcgtacaccgagaggtgctcgttgaggtcgtagatcagtgcggcgaacggcgtgacctcgccggtttccttggtgtgcgcatcttgcagggaccactcgccccagcccaggttataggactcgcgccggttgtcgtaccagctcacgcgactgccgacgatgaacatcaacggctcggccaggcgcaggcgcaaggtggcataagtaccgtattgggtggcggtttccttgaccgtgccgccacggtacatgttcggccagaaggtgctgttggccggttccgggaagtggtggtctggctgatagatgctctggcgtctgggcaggttctggattgcatagacgtcgtcctgggttccgcggctgccgttggcgccgaggatcacttcgtgttccaggccgaaggcttcgaacttgccgtcgatataggcatcgaggccgtagtccctgtggtcgtagtccatcagcgctgcataggagttggccgtcggcgccgggtcgccgtagttgatggtgccttcgctggcggcgtatttggtgtcttgcaggttgcggctgtgcactgccgagaccttgagtttccagtcatcgttgaagtggtgggtgacgtcggcaaagaacgtggcacgccggctttgccagtcgttccaggattggccaaggcaggtcgagcggctgaggttggcgcttttgccgtcggcgtagcgcggcaggccaccccagcacggggaggcatcgacatcttcgtagctggcgccgacgcccagggtcgtgtcaggtgtgaggtcaaaatccagcgcaccgtagaacgcctggtccttgcgcttggcgatgtccatgtaggacccgcgatcctgctggctcacggcagcgcggccacgcagcgtgccgctgtcattcagtgggccgccggtgtcgagatcggcgcggtagttgtcccaggtgccggccgacagcgacaggcttgtggtgggcttggcctgcgggcgcttgcgcacaaagttcaccgcgccgcttgcggtgccggcccccttgagcatgccggcggcgcccttgagcacttccacccggtcataaattgccatgttcgcactgaagctgtcggcctggacgtagtccttgcccatgtccaggggcacgccgtcgtactggtactggccgagcatcttgaaaccacgggagtagaaatacttgccacccatgggcgactcgtaggaggtgatgccgggcgtgcgctccatcacgtcgtcgatggtggtgacgttctggtcgtccatgaattggcgggtcatcacgctcaccgattgcggggtttcccgcaggctgtgttcgcccttgccgatggtgaccgcaccggtggtataggagccggtgccctcggtgctggcacccaggcgttcgccgttgataagggtagcgcccaggctcagcgcgccggtggcggccacttgcggcaatagcatccatgtgctgttgccctggcgttgggcttcaaggccttggccgcgcagcaattgctcaagcgcttgctgaggatcaaggcggccgctcaagcccgggcttgtcttgccggcgacgctggtggcgtcgtaggacaggctgataccggcctggcgtgcgaactgatccaatgcagcggcgagggcgccggcagcgatgttccagtcacgggcctgggtggcgctggccggtgtctcggccatcacggacaggggcagggcactgctcaggcagacgccgagcaaggccgcctgcacggcgcgcttgaggggtgaacgttgggaggggaacgcttgcatgaccgcggggtgctcctgaaggaagtggacagaaccggcctgttgatcggcctttccttacaggtcgagcggcaatgagaattcacctcatttattttttgaaaggttacgcgcgcgcggaaaccgtcacccaatagcggctgcggtacgtgacatcaagcttgagtgattgcgcgaccaggctcagcacctgatcggtgtcgtccagttgataagtccccgacacccgcagcccggccaccgcctcgctgcaacgcaccaggccgttgcgatagcgcgccagttcggcgaggaagtcgtccagccgcatcgcgtgtgcgctgatcacgccgtcgctccaggcccaggggtcaaggccgttgccgacaaccggacgaatgccgctgcgattgaacaacacctgctcgccaggcttgagtacctggcgggcattgcccgcatggctgttggcaaacaccgccactgtgccctgttgcaccgccagctgtgtgccttgggcttcttcgcggaccagcagacgcgtgccaagggtgcgcaggtagccgtcgcgggtctgtacccagaacggtcggtgatcggtgccggtgttgaccagtatttcaccctggcgcaaacgcaccaggcgacgctctttatcgaaggccgtgtcgagggcgctggcgctgttcaactggatccggctgccatcgtccagcgccacccagcgccgctcgccggtggccgtgcggtagtcggccatcagtgcaggcagtggcgtgtagtcgcggccgagccaggtcagaccggccgcacccgcaaccaggccgagcagtttcaagccttcacgacgggagatgtgtcggcgcgcgccgtgcagggcgtgccggccgacctggggcggcagttggctgaaatcgtcattcattgcggccacccgctgccacaccaactggtgctcggcgctggtgtgcagccagcgttcgaacgcggcggtgctggcgtcgtcggccacgttgaagcgcagcgtgatcatccactggatggcctggtccaccaggcgcgggtcagccttcggcataacgcaagcggtaacaggcatgcagcgctttggacaagtcacgctccaccgtggccttggacacacccaggcgcagggcgatctgcgcacaggtcaggccgtccagttgcgccatcatgaaggcttcgcgcacccgcggcttgagctggtcgagcaagcggtcgatgcgttccaggctatcgagaatgagcaggcgggtttcttccgacggcacttcgagttgcggaaaatgcgcaaggctttccaggtaggcgcgctccagttcgcggcggcggtactggtcgatcatcaggctgcgggcgatgctgctcaggtaagcgcgcggctgctgcaaggtttgctgtttgcgcgcgttgagcaggcgcacgaaggtttcctgggccaggtcggcggcgtgttcacggcacccggtgcgccggctcaaccagccgcgcagccaggaatgatgggcgtggtaaagctggccgatggcggcgtggtccagtgggtgatcgctcggcatgggcatcctggcacagctgtcttaattgataatgtttcgcattctagacgttggtcgtggcccttcgcaattcccggcgcgcactgtatccagcacaattttttgtttgccgccggtgcaccgactaatctgcaggcttttcccggtggaaggcttgagcatgatcgacctggcgaccctggcggttttttccggtgctgtgctgctgttgctgttgtccccggggccgaatatggcctttgtgatcagccacggcgtgacccacggctggcgcggcgggatggcgtcggccttgggcattggcgtggccgacgtgctgctgaccgccttgaccgccaccggggtgacggcgctggtcgccagttggccgccgtcgtttgacgtgatccgttatgcgggggtggtctacctgctgtggctggtgttcaagaccttgcagaaaaaacctgggctgggtgcagaccccgtcagccgcgtgccgctgggccgggtgttcctgcaagccatgctcaacagtttgctcaaccccaaggcgctgctgttttttgtggtgttcctgccgcagttcgtgaggcccgaggcggggtccatcgctgtgcagttgatagtgttggggggcgtactgaccgtgattgcgggcgtgtttcatctgctgctgggcatgtttggcggggcgctgagccggttcttcaccaggcgctcaaaaggcgcctggttgcagaaatggggcctggcaacggtgctgacggtgctggcggtacgcctggcgctgatgtcgcgcccggcctgactaaatgtgttgggcgagcttgttgtggtgagcgggcttgccccgcgttgggnnnnnnnnnnnnnnnnnnnnnnnnnnnnnnnnnnnnnnnnnnnnnnnnnnnnnnnnnnnnnnnnnnnnnnnnnnnncccaacgcggggcaagcccgctcaccacagagaaagcgtatcaacccaaccgcgccgccgcccgagcaacgatctccccacgcacgcggcgcgactcagccgtgcgcttgttggcctcatccagcacatgcttgggcgcggtgtccgggcggccggcatcgaacggcggtgccggcgcgtattcaatctgcaattgcaccaactgcgccgccgcttcgctgtacaactccgccgccagggtcagggcaaagtcgatcccggcggtgataccgccaccggtcagcaggttgccatcgcgtacaacacgctcctgcacaggaatggcgccgagcggggcgagcaggtcgtggtaggcccagtgggtcgttgccttgcgcccgcgcagcaaacccgccgcgccaagcaccagcgagccggtacacaccgaggtcacgtagcgtgcggtctgggcctgagtcttgagaaagtccagggtctgcgggtcttccatcaaggcgccgacgccggaaccgccgggtacgcagatcacatccaggcgcgggcagtcggcataggtcatggtcggggtgaacgccaggccggtactggaggtgacgggggccaggtctttccacaccaggtgcaacttcacgtccggcagggaacccagtacgtcgtaagggccggtaaggtccagttgctggatgccggggaacaacagaaagccgatctgcaaggtcatgaatgaagctccgttaaaggggtggacggcttcactctagaggcctaggctttggcgaatacgccattgaacccacgaatcacgccaatcatgcctcgaatcgtccatgtactcgcttttgataacgcccaggtgctcgatgtcaccgggccgctgcaggtgttcgcctccaccaatgacctggcgcgccagcgcggcgaacctttgccttacgcggtatcggtggtcgccgcgcaagcgcagccggtaatgacctccgccggcctggcgctggtggccgagccgctgcccgccgttgatgcgccgtgcgacacactggtgattgccgggggctggggcgtgtatggcgcagctgaagacccggcgctggtggactgggtgcgcgagaaagccagacacacccgccgcatgacatcggtgtgcaccggcgctttcctgctggccgccagcggcctgctcgacggctgccgcgtggctactcactggacccgttgtgaagagctggcgcgcaagttccctgcgctgacggtggagtccaacccgatcttcatccagcagggcgccgtctggacctccgctggtgtcaccgccggtatcgacctgtgcctggcgctggtggaagaagacctgggccgcgccgtagccctggaagtggcgcggcacctggtggtgttcctcaagcgccccggtggccagtcgcaattcagcgtgacgctgtccctgcaaaaagacgacagccgcttcgccgacctgcacgcctgggtggctgaaaacctcaccctggatttgaacatcccgaccctggccgcccaggccggcatgagcgagcgcagctttgtgcgccactaccgcgccgaaaccggccagaccccggcgcgtgccgtcgaactcatccgcgtcgaaaccgcgcgccggcaattggctgatagcagtgcctcgatcaaacgcattgccgtgcaatgtgggttcggctgcgaagaaaccctgcgccgcagctttctgcgcgccatgtcggtgacgccccaggcttatcgtgaacgtttttcgccgagcaattccaacaccgcatccagtgtggcctgaggtgcttcctgagggatgttgtgacccactccgggcaacacctggcgccgataaaatccgctgaaatgctccacgtcatcatccacgtcgggcggcggacccacgccatcatcggcaccgcataatgaaatgctcggcaccgagatcgccggctgcaacagcagggcttgctcgatggcttccagcgccgggtcgccgggtgcgtacatgaagcggtgacggtaggagtgaatcaccacctcgacaaaatccgggttatcgaacgatggcgcggtctgcgcatacagccccggcccctcggcccaggacggcgaccacagtgaccacaacagcttgcacagttcgccccggttggcggtcaagccgtccacgccgcgctgggtatgaaagtagtactgataccacaagcgatgctccgtcaccggcgccctgggcttgcgcgacttggcgatgtcctggatgttgtagccatccccggtcaccagcccgcgcacccgctcgggccacaacgccgcgacgatacacgcggcgcgcccgccccagtcgtacccggccagcgtggcctgcgggatcgccagtgcatccatgaaatccagcaggtctttggccagcgccgcctgctgcccggagcgcatcacctgcgcgttgataaaacgagtcgggccgtaaccccgcaggtagggcaccagcaccctgtaacccagcccggcaagtaccggtgcaatcgcgtcataggcacgtgggtcgtaagggaagccgtgcagcaggatcactggttggccgttgatggggccatgggcttcataggctatatcgagcattggcgtgcgtacgtagagcggtgggggtgtcatggtcatggttcatcaaatggccagagatgctggaactctagccgaaaggtgtgacgggaaggggtgggttttgagactgtgggcttacttgtccagtctggattgatacggccattcccgcgccagcagccccagcacttcaaggtcatgtcgctggccgttccagaatccggcttctcgcagttttccttcggctttgaagtcaagacgctccagcagcgcccgggacgcgtggttatgtggatgaaccagcgcttccacccgctgcaaatgcatctgcctgaaaccccattccagggtggtgcgcagcgcttcgctcatcagacccacgcctcggaattgcggtgcaagctcacaggccagcgagcaactgttccatccacggttccacttgaacaagccacaactaccgatcaatcggccctggaactccagcccccagcgagtcccgggattcggttgggtacgccattgggcaaaggtctcgatcaggcgctttgcctgggcaatgtcggtcatcgggtcagcgccgaaccagcgcatactgtcggtatcgcggtagatggcgaacagcgcctgggcatcttgggtcaccaactcccgcagttgcaggcgttgagtgtgcagggtaggaaagggggtcataaggtggcagcgacctggtctcgatcaaccacgtgcccaaagtgatgccgccacaagtccacccccaactgccccgaccgatccagcgacgagcccatggtcagatcgctgatcaacgtcggctgcaacccggcatcaaacaacgcaaaccccgccgccagcacgcaggtgtcggtctggataccgcacaccagcacgcgttcgggggccaggcttttcaggtaggcgacggtctcgggtgtcggcgcgtagccgtgcttgatgaagatgcggtccgccgcaatcaggctctggtcatccggtgccggttgccagccaagttgccgggtgaagggggtgatgcgctcgtcgtgacgctccacggtggcgattgacggcatgcgacccagcagggcattgatgccgtccaccagccacgcgggagggttgaacgagggttgcacatcgatgatcagcagtacctggcgcatggtgttcctgtccgtggcctggagggctgcccattgtgcacaggctatttcagggttgccaggtggttttctccccgctgagcttgcggtccaggaacgtcgccgcgctgatcaacgccaagtggctcagggcctggggcgtattgcccaggtgccgggcctggttgtcgaactcttcggcgtacaaacccagggggttggcgtagcgcagcagttgttcgaattccaggtgggctttttccacctggccggcgcgggccaggcattcgacgtaccagaacgagcaggccgcaaacgcaccttcggtaccttgcagtccgtcgatctggctgtcgtcgttgcggtagcggtagaccatgccgtcgcgcaccaggcttttctggatcgcttccagggtagagagccagcgcggatcggtcgccgcgacaaagcgcaccagcggcatcagcagcatcgaaccgtccagcgcggtgctgccgatatgctgcacgaaatgcccgcgctcctcgttccagaagttgctccagatatccgcgtagatcgcctggcgggtctggtcccagcgcgcgaacggcgccggcagtgagcgcttggacgccaggcggatggcacggtccagcgcgacccagcacatcagtcgcgaatgcaggaagtggtgctgctcgccgcgcatttcccagatgcccacgtcctgggtgttccagatttcgcagacttggtcggcgacttccacggtgtgcttccagccttcgtgggagatggcttcgccgtacttgttgaccaggtacaccgcgtccatcagttcaccgtagatgtccaactggatctggtcgaatgccccgttgccgatgcgcaccggcttggcgccgccgtggcctttgaagtggtccaactcggcttccggcagttcctggcgaccgtcgatgccgtagaggatattgatcttagtcggctggccgcagcagtcactgacgcggcccttgagccagcgcatataggcgttggcctcgtcgacaaagcccaggcgcatgaaggcgtagacggtgaacgacgcatcgcggatccaggtatagcgatagtcccagttgcgctctccgccggggctttccggcaggccgaaggtggcggcggcgatgatcgcgccgtgtttgcgcgacgtcagcagcttgagcgccagggccgagcggttgaccatttcgcgccagcgccctcggtagttcgattgcgcgatccagccgcgccagaatttcaaggtgtgggccagggccaggtcggtgcaaccgctgtctacgcgttcgtcgtcctggccgccgaggacgaactcggcaccttcgtcctggtccagggtgaagcgcgctatggcagcgccgtcctcgatctgcagcggatggctgccggacaggcgcaggccgggctggccgtcggcactgaagcacacggtgccgttgtcgacggttgcatgtgtaggcgtgcgcgcatagtcatgccgcaccgcgcagcgcagatgaatctcggccgtgccgctgaccacccgcacccggcgtatcagcagtggcaggtcgtcgatttcttcgctgatggccagcaggtcagtgatctctaccacagcatcatcgctgagccagcgggtttgcagcacgttggtgtcgggcaggtagatctgctcgcgacgcgcgttgggcaggtccggagtgagttggaagatgccggcatcggggctgtccagcagcgaacagaagacggacgggctgtcgaattccggccagcagaagaagtcgatgctgcctttgtcgttcaccagtgccgcgctgcgcatatcaccgatgatgccgtgggcatcaatggggctttgttgttcgctcttcaaatcaaccattgccacggaactccggatacaggctcatgccgccatcgataaacagcgtgctgccgaccacataatcggaagcatcgctggctagccacaccacggcgttggccacgtcttccacatcgccgacccgtccataaggaatcagcttcagcagttccttttccgctgcgccttcggtggcggcacggttgatcgcggtgcggatcgcccccggtgcgatgccgttgatgcggatacgctgttcgctgacttcctgggcgagggtgcgcatcagcatctccacgccgcccttggatgccgcgtaattcacatgcccggcccaggggatcaactggtgcaccgagctcatgtggatgattttgccggctgcccgcgatacgccttcgcgtatgccctggcggttgaagatacgcacggcggcacgggcacacaggaactggccggtgaggttgacgccgatcaccgtgttccagtcgtcgaggctcatgtccaccaggttggcgtccttctgcaggccggagttggccaccaggatgtccaggtggccgaaggcatccagggcctgggcaaacagccgttctacctcttcttctattgatacgttggcgccgatggcaatcgcccggccaccctcggcgttgatctgcttggccagtgcctcggccggggccgcctggctgttgtaattcagcaccacggccgctccggcttgtgccagagccttggccgcgccggcgccgattccggaactggcgccggttaccagcgccacttgttgctccaacgagatacgcattgctcaccgacctttatttcgtgagttcaagtagctgactgacggtgcgcaagggaagttcagccgtgtgaatttagcgactacaaccatggtggaaaatggaataacagaactataaaaaataaccataagatactaaaaaaccgcttaaaagcgtttgacaggctttttgtcgccgtgtcttataggcacacctcaacccgctccgttggtagttcggatgtcatcgcggggccacttacaagaggtatctatgtgcctttcggccgatataggggaactaccagttcagggaaaaaccgctgccttagttggcatgccgaagttagtgatctttgattgcgacggtgtactcgtccaaagtgaagacatcaccctgtctgtgttgatctccatgcttaatgcgcttgcgcagggcaatacaacactggatgtgacctattttatcgaacactttcgtgggcgaaggatcgcggattgtttgcgtgaggctgaacagattttaaatgttcgcttgggtcatgagtttgaacagcgctttcgcaagcaagcgctggaagcattgacacagggtttaacagcgacggatggaattgttgaagtactgcaaggcttgcaggttccttgttgtgttgcctccagcgcaccccgcagcaagatagaacactgtttgcgtattgccgggctattttcttatttcgaagggcgaatattcagttgttatgaactgggtcgctggaagcctgatccattggtgtttttgacggcctgtgaaacttacgacattgccgtgagtgaggcgctggttattgaagacagtgtcacgggtattcaggcggccgtcgctgccaatataaaagtattgggttttggtccaccgcaccggcatgcacagttggcggctgccggcgcattaccgatcgccgacatgcgcgaagtactggcgattttcaattgaccttattactcagggaggaggcattgtgaatacactgggttacctggaaagacttaaacgcaacgatcaatcttcagaggtatggtgggattcatcgcccgctgtctacctgccttacaaacagcacttgctggataagtacccggcggccgcagcttatatagatgcgttgatgccggacgatttctcccaacccaggggcctgtgcagtgtgaccaccaatccccggttggtgaccgccgttatccttgaaaagcgcgaatactggtcatcgcgcttaaacctggcgagcctgtctcccagccagttgcacaaacagctgtataacgaggtcatcgtcgaaggggcggcggctctccagccgttgtgggttcaatcggcgcaggtcgaaggctggatctcagcccaggtcgaccctgtggatgtgcgctgcaccgagcgcatgaccgtcagggggctggagctgcatcgcctggcaccgaatgtgatggtcaaggtgccgggcagtctggaggggttggtgaccgtcgagcaactggccgcccagggcgcgtcgatcaatatcaccttctgcttcacggttgcgcagttccaggccggcatccaggccatcgagcggggcatggcgaccgcgcgcagcaatgggatcgatactgcccactgcaagtacgtgatcaccttcatgatcgggcgtttcgcctgtcagcccgaactcacgctgcaggccgcggagcgtggcctggcattcagcgccgaggagctgcgctgggccgagctgatgatctacgagcaggtccaggcgttggtggcggccgcgagcgtgccggtccaaaccctgctgtccagcatcaaagtcgatgtggacgagcgaggcaacaagcattgctggcacctggaaaagaccgggcatgcggcaacctgctacacgctgacgccggacgtggttgagttcctcatcgagcgcgaaagccacggcaaaccggtggtgcctgctgccgggccacagaaaccgccagcgtcgacattcgccaagctgatccgtatcccgtacttctacgaagcctactttgtcgacagcatcgagccgtacgactttggcaaccacgaggcgtttatcaacgcctgcaacgaggccaacagcgcgcaccggcgcctggccgattactgcgttcggctctgcccggtgaccaagcccttcaagcgcgcgctcaacgcgttgctggccgctgaattcggggtgatcgcatgaaccggatgatcgggttatgggcacacccacgttcgcgctccaccgtgctggaacgtgtgtttatcgagcggggcgattttgaggtcttccacgagccgtttgcgcacatggcgttttccgaggactcggcgatcccttcggatgagtgggatcacagtttgcccacgacgtaccagggtataaaacagcatctgttgaccgcgcgtgagcgcagcaacgtgtttcataaagacatgtgctaccactgcctggatgatttgaaagtcgacagtgggtttcttgcgcaacaggacaatatctttcttatccgcgaaccggccagcagtattatttcccatcatcgggtgcatccggatatgccgttgcaggccattgggcataaagccctctacgacatcttttgtgtggttacaaagctcacgggcaaagtgccctatgtgattaatgccgatgatttggctgccgcacccgagcgggtgattcgtaagttatgcgattacctgggtattgagtttctgccgcacgccatgacgtggaagcgcgagtgcccgcaacaatggaaaacctggcgtcgttggcatgctgcggcggaaaacagtgagcgcattgtgacgccggataaacaacatattgatatgaacgcccttgaccaatacccgaagttaaaagcgatgtatgaataccatcggactttctacgcgcgcatgaacgaattttgccaataaggatagttgtatgaagaagttgattgttaccggagcggccaacggcattggtcgggccactgtggacatggcgattcaacagggttacttcgttattggcgccgacaaggatgccgaaggcctcgatgtgttacagcgactctacggcgctgaagtgttcgaagcgcagattgccgacttttccgatatggcggctatcaagggttttattccaaaactgtacgagcgccatgccactatttatggtttggtcaataacgccgggatttatcacggtaaaagtgtctacgcgtattccgatgagcagatcgacgaaatcctcaccgtcaatctcaaggcactggtctatctgtccaaggacttcgccgaacgggaaatgatccacgaagccccgcgcagcatcgtcaacattgcgtcggtggccggtgaagtgggcagctgcgatgccctctacggcgccaccaaggcggcggtgatcggcctgaccaaggccaatgcctggaactttgcgccgttcgtgcgggtaaacgtggtgtccccggcgctgatccatgacaccgccatctacgacactatccccgaataccgtcgcgccgagtacgcacgccaggaggtcctcaaggacccgatccggcccagcggcgtggccgaggtcatcatgctgctggtcggcgacgccatgcgtcacagcaccggcagggtgatttcggtcgacaacggagcctacccacggtgagccattcgatgcgcaagaaaaaactgctgctggtgggcgccggcaacctgtgcctgcaaatcctcaagattctcgggccgaaaaacgcgttcgagtttgtggtgttgggccgcaacgaagaagcgacgatccggctgtgcaacctggtggcactgtcgtgtgcgcaactggggcaattcattgcgatcaagccggtgattgccgaccttacggacatcggcaaggtgacccagctgctgcgcgaagaagccccggacatgctggtgaactgcgcgtcgctgcagtcgtggcgggtgattaccgggttgcccaagctgtcgttcgaaaagctcgaccaggcccagttcgggccgtggctgcccatgcacctgacgttgatgcactgcctgatgcaggcggtgaaggcctccggcatctcggccaaaaccgtcaacgcggcgttccccgatgcggtcaacccgatcctggcgcacgtcggcctggctcccgatatcggcgtgggcaatgtggccaacctgattccggcggtgcgcttttccatcgcccgtttgctcgaatgtgcgccggccgatgtacaggtgcagctgtacgcccagcattacttcagccactacgtaccgcgtggtggcctgccaccacgtgccagctaccgcctgttgtatgaagtgcgcgaccgcccacaggcgccccgcctgccggccgaggcgattttttctacggtgaaatccgagttccgtcgcctgggcggggtggacgggcagttccttacggcgtgctccgccgtcacggtgatcgaagggctgttttcagccacgccggtgcgggtgcatgcgcctggccctcttgggcttccgggcggctatcccgtgcaactgcacgaggggcggatcgaggtgcagttctccgaggcctgcccacaggatgaggcggtgcgcatcaacagcatctgccagagccaggacggcatcgacgaaatccattgcgatggttccgtcacctacaacccgcagtgcatggccgtcatgcaatcgatgctggggtactccaagcacagcatgtccatcgaacagtccgccgagtttgcccatgagttggcgagcaagtacctgtccttcaagaattcaacctggtaggtgcgtcatgaatcagatgaccagaaacaagcacaacgacgtggccagttactccgcgcagtactcgacggaatttgtcgaacggtgggatgagttgatcgattgggagaaacgcaaggcgggggagggcgggttcttcgaaaacctgttgcgaagccacggcgtgcagtcggtgatcgacgtctcgacgggcagtggttttcatgcggtccagctcaagcaggcgggctttgaggtggtggccaccgatggcagcagcaccatgttgaccaaggcgcgggcgaactttcgcaaacatggcctggatatccagtcccattaccgcgactggcattcactggactcgcaggagctggggcaattcgacgccgtcgtgtgcctgggcagttcgctgtgccatgtgtttgaagcccacaatcggttgcgggtgttggcgaaattcagggccttgctcaagccgggtgggttgctgattgtggaccagcgcaatttcttcgccatccgtgccggtaaattcaaagccagtggtcattactattactgcggtacaaacgcttcggtgagcttgggccaggtcgatgaacgcctgtgtgagttcatctattccttcgatgacgcgcagcagtacaggctgcaggtttaccccctgttgccgggggaattgaagggggaagtgctcaagtccgggtttaccgaccatcaaagctacggtgatttcgagcctgactacgacatgatggattgtgactttgtcatccacactgcgcgcgccgaatagggaggcttgatgagcacactcgtacagagcaatgcccgcccactggacagtgttgtgctggcggtggtcctcaccggctttgtggccagcacctatggtttcggggtttacctgttcgccaacctggtggtggacatgcgccgcgacatcggctttgactacaccacggtgggcctgatcaccggcggcgcgcagattggcttcctgctgttttcgtcggtgaccagttacatcagccgtttcttcgaaggctggaaaatcagcctggtgtcgaccgtgatgacgtccctggcgctgctgggcctgagcgtcagcgacagcatctggttgtcgggggccttgttgatcctgctcggtggttgctccgcctcggtgtacatcccgctggcggaaatcgtcaccaagggcttcagcccgggcaatcgctcgcgggtcatggggctgatctccagtggcaccagctacggcgtgttcatcaatggcttgctggtgtcgttcctgaccttgaatggtggctggcgctcgatctggctcactgccggcctgatctcggtggccctgtgtctggtggcctggtttctgttgcgcaacctggccgcgagccaggacaccgggtttgccggcgagcgcgccgtagcgtttgacagccatcagccgtggctcagccgctcgctgtacctgacctgggccatcgcgtttctcaatggcatggcattgctgccgttccagacgtacctggcgcccttcctgcgcgatgaattgggcgtatcggttcaagacgccgggtttatctggaccaccatcggtgcggtgggcatggcctcgggctttctggtggggtggattgccgacaaggtcggtgtgcgggcgtcgctggcgatgtgtttcctcagtgcaggactggccgccaccctggtgttcagtttcaacagcctcccgccgttctacctggccgcgttcctgtttgcgctggcgttctatcccattttcgggctggtccccagttacatcgggcagatcgtgccggtcagccggctgacccaggccttcggcattgccaacgtgttgatcggcctgggtggcgtgtgcggcaactttctgggcggtttttccaaggacctgaccgggtcgttctcgacggtctactgggtggttgcgctgttgctgttcgtgcaatgcgtgatggtgttcatgttgggtaaaccgccggttgcggcgaaggagggcgagcggccatgagttattttccagacagtccaagccagaacctgcacgcgtttgcgttcagccatcggcgcgccggaaacgcgcacaagcctgcggtcatctggatgacggggatctcggcgtccggcaaatcgaccatcgctgatgcgctggacagcgccttgcagaaacaggggcggatcaccgcgatcattgacggtgactcggtacgtggcgggttgtgccgggacctgggttttaccgacagcgaccgcgatgagaatatccgacgggtcgccgaagtggcccggttgatgatggaggcggggctgatggtgatcgtggcgctgatttcaccctcgtcggccagtcggcattacgcccgttcgatcatcggcaatgagttttttgtggaagtgcatgtggatgcacccttggaaatcgccgaacaacgtgacccgaaggggctgtataaaaaagcccgcgcggggttgatcaagcactttaccgggatcgactcccagtatgacgtgccggtgtttccggaagtgcacttgaatacccaggcgctgtcagtggagcagtcggtcgaggcgattctggattgggtggggcacaacgacagtcgcggttagccgtctgtctttgcgtcggctttgcgccgggggggcaatgtctgcaacttgaaaaaacaaggtaatctgcgccatcgcagggagaacgcgttttttcaggagtaggcatgacacattttacgggcactgcaaaatcgatccgtctgattggtggggcccgggtcttggactttatcaataccaccaatgggcggcgccccggcacttcgctcaaggtcattgaagaacggctgaccagttttcagttcttctttgaatgggccttgcatgcgtcgttgatctcggcccaggagttcgatgactacaagccaatggtgtttgagtcatcgattgcctatcaacccaacctcgacgcgatcattgcgttcagggaatgcctgtacgccgtgttctacccgctgtccttgcaagctgccgcgcccgacgacgcgttgcagcagatcaacgagaccttccagcaagacgctgcacgacgggtgctgcggtctgtcgagggcaagcctgcctgggcgtggatggcctgcaccacggcgcaggagctcacggccatggtgctggggcggttggccatcgaggccacgcaattgctggtatccggtgatctgcacgcattgcgcagttgcagcgctaccgactgcgactgggtgttcctcgatatctccaagaacaaacagcgcaaatggtgccagatgagcgtgtgcggcagccgggagaaactcagccggctcagacaggtgggtggcaaaaccgcgcattgagggcctatggcgagtagcaattgccccgcttaataggaagcattactattcacgtcccgcctccccagtgctcccgcgatgatccctcagccgccccgcagaacaggctttttcgaacactacgaagagttgatcgggacctggacgcgccgcctgagaaaccgccagcaggccgaagacctggcccatgacacctttgtgcgggtgcttgaggcaaaatcctccgaggttgagcaaccccgggcctatctgcatcaaacggcgcgcaatattgcggttgacgcctttcgacgcgaagaccgtcgcgaggccatgaccctggaagcctttgatcagcgttcgccgcacgcgggcgacccggagcatttcatgcacgcgatccagttggcggactttatcgagcgggccttggccgaactgccgctcaattgccgcaggattttcatctggcagaaaatcgagggccttacccaacaggaaatcgccgaccgcctggggctgtctaaaaacatggtggaaaagtatatgatccgcaccctgcggcatctgcgcgaccgcctggacgcgatggcgccatgatcgcccgctctgaaacaggatcatccatgatggataaccgtgcccgagacgaagccgcgcaatggtttgtgcgcctgcaagacgccgagttgagtgctgccgaacgccagcgtttcgacgcatggcgcactgaacatcccgatcaccagtacgaattcgatgtattgcagggcgtgtggagtgctgctgacttactgcccaaagcccgcctgcaggcgctgtgcgaagctcctgtggagcgtccaaaacgccgtgccgtcttgcgttatgcagtagctgcgagcgtgatcgccgttgcgctggggttgggcctgttcagtgggttggatcatccgaagccctacagcgccgagttcagcacgcgcctgggtgaacatcgccaggtggccttgcccgacggttcggtgatggacctcaacagccgcagcatcgtcaaggtgcattacgaaaaaggtcggcgtggcgtcgagatcaagcagggcgaagcgatgttcagcgtcgaacatgacaccagcaggccttttgtcgtggtggccggcgcagggcaggtgaccgtgaccggcacgcgattcgatgtgcgccgcgatgacgaccagacccgagtcatggtcgaagctggcaccgtaaaggtacaaggccgctcgcctgacaaggtggtgacgctgacggcgggcctgggcagccatgtcgacaaccagggacgggtggccgcggcctacgcggtgaacaccgaggaattgaccgcttggcgcactggcaagctggtcttcaacaacgcttcgttgggcgaagtggtccgggaagtctcgcgttatcgcgagcaaccgctgcgggtcagcacgccggccgtgggcaacctgcgcgtgaccagcgtgttcaaggccaacgacactgacgccttgctcaaggccttgccgcacattctgccggtggcgctgcgcaccttgccggacggcagccaggaaattatttcacgctgacattcaggtttttttcgagttcttcgtcttctcctgcaactgcaactggtttgcattaacagccgcacactcttgcgatcacaggactaggttcgacgtgaaaaaacttgccgtgaacaacaataaaatctcccgctgggcgccgctggccctggcgcttgcggtcagtgccgcgctgcctgtggcttacgccgccgagtctatccacatcaaggcccagcccctgggtgcagcgctgagccagttgggccagcagacgtccctgcaagtattcttcagcccggagctggttgcaggcaagcaagcgccggcggtcgacggcaacctctcccccgaacaggccctgcgccagttgctgcaaggcagcggcctggactaccagatcgatgccggctccgtgaccctgcgcccgttgaacagcggcaccggtgaagccggctcgccgctggaactgggcgccaccgatatcaaggtcgtgggcgactggctcggcgacgccaacgccgaagtggtgcagaaccaccccggcgcgcgcacggtgatccgccgcgaagccatggtggagcagggcgcgatgaacgtcggcgatgtgctgcgccgtgtgccgggtgtgcaggtgcaggaatccaacggcaccggcggcagcgatatttccctcaacgttggcgtacgtggcctgacgtcgcgcctgtcgccacgttccaccgtgttgatcgacggcgtaccagcagcgttcgcgccgtacggtcaaccgcaactgtcgatggcaccgatttccgccggtaacctggacagcatcgacgtggtgcgcggtgccggttccgtacgctacgggccacagaacgtcggcggcgtaatcaacttcgtgacccgcgccatccccgagaaattctccggtgaggtcggcaccaccctgcaaacctccgcccatggcggctggaagcatgtcgacaatgcgtttatcggcggcactgccgacaacggcatcggcgccgccttgctgtactccggggtcaatggcaacggttatcgcaacagcaacaactctaacgacatcgacgacgtgatcttcaagacccactgggcgccgaccgatcaagacgacttctcgctcaacttccactactacgacgccagcgccgacatgcctggtggtctgacgcagaagcagttcgatgccaacccgtaccaatcggtacgcgactgggacaacttcagcggccgccgcaaggacgtgtccttcaaatacatccgccagatcgacgaccgtacccaggccgaagtgctgacctattactccgacagcttccgcggcagcaacatcgccaaccgtgatttgaagaccctcggttcctacccgcgcacctattacaccttcggcatcgagccacgcgtctcccatgtgttcgacgtaggcccgagcacccaggaagtcagcctgggctatcgctacctcaaggaaggcatgcacgagcaggcgaccagcctgaatctggtcaacaatgtaccgacgccgggcggacagagtgacggccacgtctatcaggatcgcaccgggggcaccgaggccaacgcgttctacatcgacaacaagatcgatatcggcaagtggaccgtgactccggggatccgtttcgaagatattcgcaccgaatggcacgaccgcccggtgatcgcgctgaacggcacccgcacccaggaaaaacgccgcgaagtccacaacaacgaaccgctgccagcattgagcgtgatgtaccacgtctccgacgcctggaaactgttcgccaactacgagacttcgtttggcagcctgcaatacttccaactgggccagggcggcaccggcgaccagaccgccaacggcctcaacccggaaaaggccaagacctacgaggtcggcacacgctacaacgacaatgtctggggcggtgagctgacgttcttctacatcgacttctcggatgagctgcaatatgtcagcaacgatgtaggctggaccaacctcggcgccaccaagcacaccggtatcgaagcctcggcgcattacgacctgtcgaacctggacccgcgcctggatggcctgaccgccaatgccggcttcacctacaccaaggccacctccgaaggtgacgtgccgttcaagggccgtgacctgccgctgtactcccgtgaagtggccaccttgggcctgcgttacgacgtcaaccgctggacccataacctggatgtgtacgcccagtccggccagcgtgcgccgggtacgaccagcacctatgtcacccagggcacggctgacggtcagtacggtgatattccaggctacgtctcggtcaacgtgcgcagtggctatgactttggcgagcagttgtccaacctgaagctgggtgtgggcgtgaagaacgtcttcgaccaacagcactacacccgttccagtgacaacaacgccgggttgtacctgggcgagccacgcacgttcttcgtacaggccagcgtcgggttctgagtcatctcgatagaaaaagtcgcagctccattcagggctgcgattttttttgccggtttcctacgcgtgcacagcgtatttggctgtctttcgcggaactgattccgacgcaacccccacacatgggcatacctgaggggcctcgacgctacgttggagcgacagcctgaaggtcacgctcactgtattggagaaactcatgtcggtatcgactctcgatgcacccgcatctgcatcaaacacgtccaaccgtgcgctggcagacgccaagcctcaggccaaacctgccggctcggcgcctacagcgctttctttcaatgaccatggcaatgccagcgtcagctttcacgccgaagagaataagtccgggcctgtgtttggtaatgctcagccaaccatggaccgtcactttccgggtcagcacagcgcgttcatgccgctcagtttgctggataggttgagagaatggatggccagtttgtttgctggtcaccgaccatcgatgcgtccgggttgtggtaatccaccgccaaggccaaattctggctggagcaacccgccgccacgaccgaaccccactgttggcaagccctgtccgacccgaccgtgcgaatctgatgctgactacagcctgaagagccgtaaacagttgatggggctgatgcgcgacaattttccagccttccaggatcccaggtacccgggttacctgagcgttgacagccttaaagcgaaggcgaatcggccgttgctccctgagtacggtccgaacaaagaagagaacaagaaaaagaaccaggaaactctcctggccaggcaagtcttgaaagatccgaaacttatggatgccatcttccgaaacccggtcacaggcgcacgggagcgtctggccagcccacaaaggctggacatgcttgccaaaagggaggactacttcacctactacagcgaaaagcaattgcgccaagaagtgcgtgagcattggggccggaatccgcggatcgaagtcctccagaggtcggcgaacagaccgctgacgggtgattctgataaggaccatcagaccctactggcgcgggagctccttttccttcgcagcgatttggtggcagagctgttcaaaaaatgacttctaaaccagtcctgtggcgcggttactgacgtctcgctaattatcgttcatgcgccgcaacaacggttgcggcgcggtcatccatcgtgcgtgaactgtttgcgctcaatgccactgacctcctatccaacggctttgttaaaaacggtcactcttcagctaacacgtgagagctaaccaatgacttcaacctccttcaaccgcccccccgtgggctgccaggggtttgctggctctggccatgagccggacctccccgcagcaggtagaggcatcgctaaagaggatcctctgggcacgccgtattcacacgctgccgagacccgccgtatgaaggccttcgatggccagggcaagttccaggcgccggtcgccgatgacttttgccgcggcttgaccgagtctggactgcactcggtggatgatgccaaggcgccaggaagcgtcggggtcttcgatggcttgaagacctggttgcgcagacagaggggcaattgatgcccggtgtcagcatctttttacatgctgtcattggtagttaccgatctgacggaactgccgtatgtattcggccacacatcaggtgcccgtctgcctggagtccattcaatgatttcggtgatcacggtcgcgctcactaaaccggtgaggatctgaaaaagttggagaaaacgcatgagtatcgagggtgtatcaagactctgccggccggccccgaatgtcgcaagtgagccatcaaccccgtcacaaccggccgcccagccttacaccaggagtgcggtttatgctgcgcagccggatggggcgcacaggccaaggctgttgcgcacagcgcaactcgggctgagtcaccgggcgctgcagaatgcgcccaccgcacgcgcacaggtcagcgaacccgacgcaacatggaccgacaggcaactggcgcaagcgttggaaaaaggcttcggtttgctgcacccgtttctgaaagaggggcgattgacgtactctgcgttgtgccgggtggccgctgaatgatggggcaaagcgatgagctgaacagggtcatcaacgtcgtccgcgaactgctcaagcgtccatcactgattgacgcgatcatgaaccgcgacggttacatcacgcgagacagtctcatggcagccgctgctttaccgggtaacagctcgcccagtgagttcagccaggacccgttccatgcccaagacaatgactgcgtagtacaggccttgaagaacctgttcgagcaactgagggacccgaccaaggaccgcacgttcctttttgaaccgtatcagtacctcgcgattgaaacgctcatgaaggtcatgcaggacccctacgacgttgatcatgacggtgtccccatgctggaatcttctaccggcatgcccaagcccaagtacagcgaactctgtgtctataccgcgaagaacattatcgagcgcccggggctgctgctttcactggaacgtgtcaacagcccgcgactgttcggcccgcctcatcatgcaggctatctcagtaacaagagccttgatctctggcgggagcggtacaaggggcgcaaagcacgctgacattagaccttgaggattttgccgctgatggccaccgcggccagcagtagggcgatcagcaaaaaggcggtactcaggctgctgccatgggcgataaagccgatcacggcggggccggcaagaataccggcgtaacccaaggtggtaatggccggcaccgcgatatgttccggcatgaccttttgcttgccgacggcggtgtacagcaccggcacaatattcgaacagccggcaccgaccagcgcatagcccagcagtgcggtttcccatgccggaaacaaggtggccagcaacatgcctgcggtggccaatgcgccgcctatcacgataacgcgcgtggcgcccaggcgtcgcacaatggcatcgccggtcaggcgtccagccgtcatggtcaaggcgaatgctgcataacccaggcctgcataggcttcgtccaggccgcgttcggcactcagaaacacggcgctccagtcgagcaccgcgccttcggccaggaaaacgataaagcacaggcagccgataaacagcaccacaccgtggggcacggcaaacgccgggccggaactttcactgccatagggcagcaggtgcggcgcagccttgagcagcgccgccagcgtaatgacgatcaccaccagggtcgcctgcaatggcgacaggcccagccccagcaaacccgagacacccgccgcaccgacgatccctcccaggctgaacagcccatgaaagcccgacatcatggttttgccgctggcgcgctcaacgatcaccgcctgcaagttgactgtggaatccaccgtgcccaggccggcaccaaacaggaacaacccagccatcagcagcggaatcgaactcaccgtcgccagcatcggtaatgccaggcagatcatgatcgtcccggcgctcaatacgcgtcggcagccgaaacgtgaggccaatgcacccgctgcgggcatggcaatgatcgaaccgacacccagacacagcagcaacaggcccagcgtgccttcgctcagtccggcgcgagccttggcatacggcaccagcggcgcccaggccgcgatgccgaagccggcaatgaagaacgcgatacgggtcgacatttgctccagccgcccgggaaccacgggcgctgaggtggggatggcagtcatgaaaaatccttggttttgcgttcaacgaacgatgtccggcgcgacatccttgcacatcaggccttggcgtgcgagccgggttcccttgggattccggctgccctgaattttatttttacaacgtggaacgccagggcgacttacggccacataagcagtaccaagtttgtaggaggcggtctggaaggtgcgtaatcccagcgagagcgtttgaaccccagggttctcgcggtggattaccaccttccaggccgcttctgaaaacgcgtcaagcgggtggtgtgcaacgccgggatcccccacaatcgagcagctcctttttaagatcaacgcctgcctcggtggatgacctcatgaccctgttctacgacgctcgcggcaacatctatggcgtggccagcccggctttattgcgccgcaagggcattgatgtacctgagagtgctgagcgtgccgcggttgctcgtaccgcctggacagcgtcggctatcgcctcggaatgcagctggggctcggtgccgcacccggctggtggcaaggcccatcgttgtgatggcctgctggtggggccgttccaggacgcgccgccgttcgatctgctgatcgtaaacaccgacggttccctggccgagcgcagcggtaatggcttgacgattttcgcccaggctctcaccgaccagggcctgatgaccgaggcttgtgagttgcgggtccatcacgacaaatcggatgcgcaatcgccggtcgctactcgggtggaacccaccgttcgtgacgatgttgcagggttctggcttgagctgggggtacctgcctttgggcttgcggcggtgggcgcgcagggggttggtcaggtgtttctggaggggactgaactgagccatgtcaccgagctggcggcgatcagcccacagtgggccgccagtcaattcgtgcgagtaggcaacccccactgtgtgacgctggtccagcagctctcggcgttgccggataacgcacagatgctgctgccaaagctgttcgagcccttgaaggcgatcgcctttgcgcccccggcgggcggcggccaaccttgtggggcgggggtcaacttgcaatgggcggcgcgccagcctggcaaccaggtcatagcgcgggtgttcgagcgcggtgaggggccgaccgcgtcctccggcaccagtgccagcgccgtcgcctgcgcggcatggcgtgcgggctgggtcgagagcggtgaagttgcagtggtgatgccgggtggcgttgcgccggtacgcttgcacgcccagggcgagacgctgctcggcgtcagtctgttcgggaccgcacggctgcaggcctgaggttttttaacggctgacgctgtgattgagtgtcggctgtttctttgtcagttagttgtgattaagaaggttaatgtaggacatttcttattgttaagaagtggcacattgactcgttttattgttttgtaaaagacacttccaacttctttgtacgaatcttcttttttattttaaaacagccgattttttcccgtaatcgctaagctttgaggcgttcagggggctttttctcggcagcttatttgcacacttaacgaggcaaagcattcttgcgcgctcattaatttacggcgggtaacaacggatggttaacgcgtttgtttcgtcacgtttcaaactgattcttccttgcatggacaccgactttcaggtgctggcattcaaaggccgcgaggtccttgatcagccttttttcatccaggtgcaggtggtcagtgaaaatccttcccttgaccttgagaggttgctccatcaacccgcctacctggatttcggaatgggcgaagggctgcatggccaggtttacgcaatcggccgggacgaccctggccggcgcatcacgctctaccacctgaccctggcaccccgcctggcctaccttgcacaccggcgcgaccagcggatcttccagcaacgcagcgtgccgcagattatcgcggcggtgcttgagcggcatggcatcctggcgggcgcctacgcattcgagcttggtcccgtggtgtatccgccacgcacgttctgtgtgcagtatgcggagagcgacctgcacttcatccagcgcctgtgtgaagaggagggtattcattaccattttcgtcatagcgcagatgctcatctgctggtattcggtgatgaccagacggtgtttcgccgcttgccccggcaacgctattgccctgctggcgggccgcaagccgctacgcaggtggtccagcgttttgacgtgcgcctggccacacgcacccagaagacggtgcgccgcgattatgacttcgaacatccttcattgcagctgcacgactgcgccggcccggctccggcgcaacctctcgaggactatcgctacccagcgggattcactggccatgcccggggcaagcggttggcgcggcgggggttggaacgtcaccagcgcgaccgtcttcgggcattgggccgcagtgatcaaccggcgctgcgcagcgggcatttccttgaattacacgatcatcccgatccgtcctgcaatgacttgtggctgatcacttcagtgcgtcatgaaggttatcagccgcaggtgctggaggaggtgacgcccaccactgatgcattccaggggtatcgcaatcgcttcaccgcgacgccttggcaagcggtgcatcgaccgcccctcaaacatcccaagccgaccatcaatggcagccagaccgcaaccgtgaccgggccgccgggggaggacgtgcattgtgacgcctatggccgggtgaaggtgcgcttccactgggaccgcctggacaaggcggatgataaaagcagttgctgggttcgggttgcatccggatgggccggtgacgggttcggtgcaacgatcatcccgcgcgtgggcatggaagtgctggtgaccttccttgaaggtgacccggaccagccgttgatcaacggttgtctgcccaatgcgtcgcatcggcccgcctacccgttgccgcagcacaagacccgcagtgtcttgcgcacccgcagtacgctggggggcgagggcgccaacgagttgtacctggaggatcgtcgtggcaaggaactcatttatcttcgtgcgcaacgggacctggagcagcgggtcggccatgacagtcggttggaagtggcgggggagcgacgggaggtcattcgcggattgagcactgctcatctggaaagcgaagaacatcgtcatatcaccggcgatcgcaagatcgagctcaaggcgaacgactacctcgatgtacaacacgacagccgaacgcatgtggggcaaaccctgatcctggaggccgggcagcagtttcatctcaagtccggtgccagcctggtgatcgacgccggggcgcaactgagcctcaaggcgggtggcgagcatctggtcatccaggccggcggcatcttcagcagtcgccccattacactgggtggggcaccgcccgtcaccctggcggcgaatgcctcggcagcggtcgacacacccaggatctccgtggtgcaaggcagcctcatggacttggccaggcaattgggggcggattactgcccggtgtgcgaacgctgccgcgaaggtcagtgtggactggcagggagggccgcttgatgccaagcatgccaggccagtggatggaccagcagcaacagaggggacggtgcctgtgtttgatccttgaagggcagaacgacgcgcgcacgccgctgctggaggttcgcgacttgccggcgtaccgcagcgtctatgcccagaccgccgtggcggagttggcggccgaaggcccggtgatcgtgctgcttgaccaactgagtgaacccgtcttgcttgacctcttgcaacaacccgatacgaactggggctggctgggcagtttgcccagcgaagacctgacggcagtgacccgacactggcgtgacaggctgctggtgggcccggaaggcgcgcaatcgctgtaccgcttccacgacaaccgtaccctggcgcgtgcgctggctcatctgtgccaggaccgctggccggtatttctagggccattgatcagcgtgtgctattggcacgaaagccactggcacacggctgacaaccgggctcccggcgagtatccggtgccggatcccgcgccctggctggatacgcccaacccaaacgcagcggccatcctgcacgccaatatcctgcgttacctgttgacggagcacagtgaagacctggcgacattggtggaattccaggacccgcgaatctggctggcacaggtactggagcaggcgcgtgcctggcagtggcaggggccggagcagctggagtttctggtggtgcgaagactggaggaggcgactcggagcagtgttttgcagtggcagccaagggtcggggaagcgcctgggcagcactttgagcgggtagtggaacagtggcgattgatggggggaaagcatgagtaggcgaaggtggggggtgttgatggtactgggggtactcgggctgacggggtgcggggggaaaccggtggatcgatttacgttggaggtggatttgccagcggaatttgaacttaaaactgccgcaaattatctgcctgctaccggtgagacctgtacgttgccgcgacgtcggggtaagcgaccggagcggaaagtctttttcacggatttcaaagctgcggcgagcagggtgagctatgaactgccgctgagtgaaaaaatcgagggctgcccttcggtactgagaagcctggagtttgagttttatgcgaagtggggcaaacgtgatacggacgtgggtgggagttttgccgctatctccgttcgcgacccctcggacgctgatatacgaggcatgccagtaacgggtgttcaggagctacataagcaatgtcagtggttgttccgcactgtggggctgcagcacgcgatcgtcaaggttcttacatgcagttcgtcaggtgcagcagtcccgttatccagacctgtgcaacgagatcagctatcaggaaaaacgctcaggatggtgctgacgatgaccgatgaggaagacccctattttgataacaactgggtcgttgttcccggtggatggaagcgttgtagaggcaaggattttgaagatctggatgcgttttgcaacggcaataccactgacttcaaacctataaaaatgccggacggtcgcatttgcgatgtctacccatcctgcaagtaagcaaggagaatctcatgaagatggatgcacggaagcaggcttttttcagtgacagcaaaccggcttgctcattgcgagggcattgggtgagtttttgtctggtcgatgaactcggcgttgggacggcgtacggtggattgccttacaccgtccacgacagtgcagggcaacagtacaaaggcagactgaatggagagggctttgccaagttagccaatatttactgcggtcctgtaatccttgtttttgacgatccgtattcaggaacagaacggttgtatcagaggttgatgtcgcgccagacttataaacttccaatcaccgagttgcagattcgtgctgagcaaactcgattttctgcctcggatggtcggcgtactgaaagcaaccccgcccagttgaaagctgactgtttctaccaggttgaagtccgtgatctggttcgccatgttgcccacttgccaccgattgcccagcgcactcatcaacctcgacgacacgcattgaaaatgctcgccgacctagggttttggccgccccaatcgacgctggtggggatcgtgttgttccccaaccaccatactgcgctggaggttcggccgctgcgagccttgcgcccgttgttttccaacgaagacagcttttgtgccttgaacctctatcaattggcattgatggcaaccttgagctactgcaatttcgggcaagaacccgctcgagcacccactgaggaggttcgatttcctttcgatccgagtgtcggccatctattcgctgaaaaactctcgggtttccacgaggcatggcgggttgatgccgagcagcagcaacgcttttatcccgtctatgaagacgtcccttactctcgacgattcgagatcctgcccttcgatcctgagttgtatcctcagaaccatcctgagcgggcagaagaacaagaatatcctgcgcgtttgcattttttcgacgacgaaaaattcggcactgatacccaggcgttcatcactcatcacgaagaggtgattctgattgcggtgcgcggaacggccagcgctgctgacgggttacgggacgctaatgctcatcaagtggtttttttggagggcgttggcaaggtgcatgaaggtttctatcaagcctatcaggcaatgcgcaacttcatactcagctacctcagacaatttcacaccaaccaacgaataatcatctgcggccacagcctgggcggtgcaattgccttgctcttggcagaaggcctgcgtcggtcgccggagggcaactacaacatcctcctctacacctacggcgccccccgcgccgccgattccgaattcaccgcgggcgcctccaccctggtccaccaccgtatcgtcaaccacaacgaccctgtccccagcgtccccgccccgtggatgaacaccactgccaagctctgggtcccaggcgccgtcacgctgttcagcgcgcccgcgccgggtgggttgctgttcgctgccggcctggtacgtttcggtggcaacccctacgagcaccatggcgaacaacaccatttcatgccgatcacgctcccggatggcacgcattcttcggtgttgtggcaacccggctgtgagtccatccaggaggccggttgcaaccgggcgctgcaactccacggtgatatgcctgaacgtgacaacctgctcaagcagctgttccaggccagccagcatttcatgaccgccagctacattccggccgcctgggcaacactccggcgctggcagcaaacccaggaaagcaacgggcccttggtaacgccgagggaattcgaactgctcgaccacgcgctcgagaccatgcgccagcagttgcgcaacaagcgtcgggagctggcccgtctaagggccgccaacgaccgaggttatgagcacaacgaagccttgaataccgaaatcgaccgcttgcacaccagtcgcgaacgccttgcaaccctgcgttggcgccgtctggaagcccgtgatgtctatggcagtcatgcccatgctgcccacttggcaccgagcctcaagcgctggttcagccaccgtgaaaatcgggagctgtcgcaggtcgcccgtatccctcccgctctggataaagacagggggagggcgcatacgctggatatcgactcgatcgtctgaccgagcttctacgcaaactccacctgggctggccggcgcgtcatcaacaccttgccgttacggatcgagtacagcggcagaccctggctgcggatgacctcgtagtcgctgtccgccgagaggatcaacaggttggccgggcgtcccggttccaggccgtagcgatcacccagggccatggccttggcgctgttgtcggtgaccaggtcgagcgcgctttgcaggttgcggtagccgagcatgtggcagatgtgcaaaccggcttcgagcacccgcaggatgttgccgttgcccagggggtaccagggatcgacgatggagtcctgaccgaagcacacattcatgccggcttcgagcagttcgttgacgcgagtgacgcctcggcgtttcgggaaactgtcgaagcgaccttgcaggtgaatgctctcggtggggcaggagacaaagctgataccggaatgccccaacaggcgaaacagcttggcgcagtaggcattgtcgtaggagcccatggcggtggtgtggctggcggtgacgcgggcgcccatgtcgcggctgcgggcttcttcggccagcacctcgagaaagcgcgagtgcgggtcgtcggtttcgtcgcagtgcacgtccaccaggcagccggtgcgttcggccaggtccatcaggaacttcaccgaactcacgccctggtcgcgggtgtattcaaagtgggggatgccgccgatcacatcggcgcccaggcggatggcttcctccatcagttcacggccgttgcggtacgactcaatgccttcctgggggaacgcaacgatctgcaggtcgatcaggtgtgtgctttcctcgcgcacttccagcatggccttgagcgcggtgaggtccgggtcggtgacgtcaacgtgggtgcgcacatgctggataccgtgggcggccagggcctgtatcgtcttcttggcacgggccttggtgtcttcctgggtgatggtggccttgcgctcgccccagcactcgatgccttcgaacagggtgccgctcatgttccagcgcggttcgccagcggtcagcgtggcgtcgaggtgaatatggggttcgacgaagggcgggattaccaggttgccggcggcgtccaggtctcccgtgcccaaggccggtactgtcgattgaacggtgatactggcgatccggccatgttccaggtgcagatcatgcaggccttcacggttgcgcaggcgggcgttgatgatgtgcatgggcaagttcctcttggctaaaaacaatcaggcagacagtcgccagatcatcagcgcaatgccaatgtccaggcgatcatatgaattatccagcgtcagcccgcacagggcttcgatgcgctggacacgttgtgtcagggtgttgcggtgcacgcccagccgctgggccgcggccaccaggttaccattctcgtgaaaccaggcttccaggctcggcatcaggttggggccatgctgcgcgtcgtggcgcagcaaggggccgaggcgttcattgaggaattgatcgagcagggcgcgatcacgcacgccactgagcagcttgagtacgcccaattcgtcgtaaacgcacagcccggcgcgctcgctgaaacgccgcgcggccgccagtgcctggcgtgcttcatcctgcgcctgggccaggcgcgccggtgggtgcgcggtggcgctgaggccgataaacaatttgagcggcgccaggcgcaggttcaacgggttgagccagttaaccagttgctggcggttggccaaggcggcgacggcgtccggggccggcagcagcagcgtccattggccggcccgcccaagtaccggcaaccccgccgacacctgacgcaagcgccggctgatagcgtcatgttgccgggccagttgcgtctcgaccgacgccgcgttgccttgggcaaacagcaactcactgccttccaactgcagttgcaccacctgccaatgcccagccagtgacaggcccaattgcatgcctcgatgcagcagcaaatcgagggattggtagtcgccggtcagcaaacgttccagcacgtcgtgccgcgagcgacccaactgctcggactggatcagcgccgagccaatggcctgggtcaccagcaccattttcagcgagtagggctgttcgatcagcggcatgccggcggcttcggcggcctccagcaagtgttggggaatcgcctggatgtacgccggccccgtgaggatcaccagcccggccacctgacgctcgcaggcttcctccagcagttgcatcaagttgtcttcgtcgcgggggtggttgatcccggtgacgaacaccagctcgccgcccaatacccactcggcaatcccgctgttttccgccacgtagggccagcgtacggcgttctccaggccggccgcgccggcgcgcaggcgcatggattccaggcccggcagggccagcacatcggcgatggtcaggctcatgcctgggcgtcagccaagggggcccgcacgcgtagcacggcggtgagcgcgatgtaggtcagcgacgcggcaacgatgcccaccaacggcgcgacccaaggcgagttgaacgccagcacggtgcccaccgcataggccagcagccctggccagttgaatgctggcaggcgtgtatcggccaggcgtggatagtggccgcgatagcggtagaagaagtccgccatgatcaccccgccaatcggcgggatcaccgtgcccagcagaatcaggtacggcaccagcatgtcgtacatacccagcaacgccagtagggtgccgatcaccgcaccggccagggtcacgatcttgcggcgttgggtgcgcagcagattgcagccggccactgcgaagttgtagatggtgttgtcctgggtgctccagatattgagcagcaacatggccatcgccgccatggcaaaaccttgcagcagcaacacttcgaccacgtccggttgttgatagacgatggcgccgtaggcgccgatcagcaccatcaagccattgccgacaaaaaaaccgatcaggctggccagcaccgccaccttggccgagcgcgaaaagcgtgtccagttggtggcctgggtcgcgccgctgacaaaggtgccgaacaccagggtgattgccgtggacaagtccaactcaccggtgggcaccaccgcgagcagcccatccaggccgccgactttcaccgtggccacccacatcgacagaaacagcaggatgcccatggccggaaccgcgatataggacagaatctccagcccgcgataaccaatgtacgccgtggcacagaacaccaggccaaataccaccatcaacgccagcacgctgccctggctgagttcgaaatacttgcccagcaccaccgcggcggtggctgtgccccaggcgtaccagccgatctgggtgaagccgaggatcaaatcgctgagcttgctgcccacttcgccaaagcagaaacgccccatcaacaccgagttcagcccgctcttgaaggcgatgtaacccaggcttgcggcgtagatacccaacagcaggttacccagggccacgacgccgagcatgtcggtgaaactgaacgccacccccagcttgccgccggcaaacatggtcgcggtaaaaaacgtaaagcccaacagcaccatggcggtcgacgccaggcctttgcgcgcatgcatcgggacttcgctaagggggtaatcgttgcccggttcttgctgcgtcatgtgccttgctccctgaatgagtgacgcaggcctattgcaccgtgcgtgccaagccggcagcagtggcgagcgcacgatgggcgctgtgcaccgtgcacagtatttatagccaaacaggtggggaatgccgcaagtaatggtcgccgtgcccaatcgggcacgaaagcggtgcaacagtgatacaaattggatcagtcgaacagcgtgtgggtggtctcgccgcgatggaaggcaaaggccgcctccagatcactttcgatggtgcgcccgcgggacagcggcggcagctcatccaggcggaaaaaacccacttcggtggtctcgaagcctgccatcggtgccgactggtccactggctcgcacaggaagtacagcttgtagaagtcccgcacgtccgggcgatacaagcccttggccttgtgcgtgacgctgtacaacgcccgcgccttcaccgtcagcccggcttcctcgcgaatctccttgacgatgttttccgccgccgacaaaccgatatcggcgtaaccgcctggcaacgcccagcagccatcagtcaactcgcgcaccagcagaatccggtcgccctcaatcaccgcgccgcgcacgtcgatcatcggcgtcgagtaacgctgggcgaagtcgctgaccaacccggtgatacgttccaggggcacattgcccagttgcgcaagcatgctgtgggcaatctcggcaatttcctccaggcgttcacgctcgaaatcatcggtgcagaagtgcaggcccgtggaggccaatgcctgcaagcgtttggcctgggcaagccaggtgttttccatgggttactcctgcaaatgcttggtcatgtacacccgacgcaggccgtgtgcttcggcgcggtgggtctcgacatagccacgccgggtgtacagcgtgatgttctcggtcatggcttcgttggtgtacaggcggatggcggcgaagcctgcgtcgagcgcctgttgttcggcgaagtccatcagccatcgtccgaaacccaggccctgagcctccggggcgacggccaggttgtccagcaatagcgcgccgtcggtaggcagcaggataatgaacccctgaacccggccggcattctccagcacatgcacgccaccggcttgcaccaactggggatagtcctccagcatcggcccgggcttgcggccgatccgcgcgatatacggtgagtaggctgcctggacgatggcctcgatggcagcaacatcatgactggtagcggggcgcatcattgcagcgtgctcttctggaaaatcgatcagtctgctggcgcttcgaagatgccttctataggccgcccgaacaccttggcgatcttgaacgccaagggcaagctcggatcgtagcggccggtctcgatggcgttgacggtctggcgcgacacacccaggcgctcggcgaggtcggcctgggaccatcccagttccgaacgcagctggcgcatcaggttattcattggtagcgccttgtgccgatgatcgtggctacacaccagacgccgcccatgatcggccacaccataaaggccgacagacgcggaaagccagcagtttcaaggaagccgtagctgaaggtcgtcagcgccgtgcacacgaaggccacggccagtgcgtccaactgaatcttgcgacccatttcatccatggcgttcagccgacggatgatcgtaatcgccatcgcgatcatcggaatgacgggcagcaaagccagggcaattttggcggcgccgtcgggcatggacgacacgtaggtgctggaaactacgacgcacacaaaatacgccagcattgtcaccgcgaattccaccaagaagcgtttgaccgacataaccatctccgtgagtaaagggtgctttacattaggcacaggctattgcggtgtcaagggtgctttacatggatgaagggctggcacaaaaaaaccaccgcaagggtggtttttttcatcgcaccggcttactcgccgcgatagatgcaaccgctggtgcaggtctcgtggatacgaatcgcactgagctcaggcagcaggggtttcaactcattccagatccacttggccagtacttcgctggtggggttttccaggccggggatgtcattgaggtagttgtggtcgaggcgttcgtagagcggcttgaaaatcgccttgatctccgagaagtcgcgaatccagccggtatggggatccaggtcgccgctgaggtggattgccaccttgaacgaatgtccatgcaggcgcccgcatttgtggccttccggtacgtggggcaggcggtgggcggattcgaaagtaaactctttgaagatttccacggtattttcagctcggtcaggtatctggcagccggcgagtttaacagcttgattcgttgccgcgcataccgtccctctgtagacgccggcttgccggcgaataaagattgcttgtggcgagcgggcttgtcccgcgctgggtcgcgaagcagccccaaaaccagcagccgaagagtgcctgactcaccgcattcctccttccagggccgcttcgcaacccaacgcgggacaagcccgctcgccacagttgcagtgttcacatttaatcgggtggtcatcccccaaacccctgccggattccggcccgcgtctacaggatctgcagtctctcgcccaatctgccgttatccgccagctccagaaactcatcgcccagccttcggctttcactcatcgcggtctgccagtacttgttgcggctcgcgtcgtcgcccatgaagcgcttgaagtcgctgcggtctggcagtttgccgtggggcaggcgggccaggtagtccctggagggcgccagcagcaacacatcctgcaagccttgctggttactgcgtcgccacggcaggcctttgtcgaaccagccggggatgacccggtcggtgaagtgcgggtacagcacgatgtcatcgccgtggtagggcaggtcgaggtggtagtccagcaggccgccgtcgcggtaggtgccggcgccggcgcccggcaggtcgcgcacgccttgcatcaccatggggatcgaacccgaggccagcagggcttggcgcaggttgcccaggtccaggggcaggaagcgcgaggggaagtccttcagcgcatgcaccggcggcgcctggcgcgggtcgtggatgatcagccgttcgaagtgccgcgacagccgcgcgcggccgcgcaggttatcggcaatcaccgatgacaggcccagcccgagccgtccgcgatggtcgtcggccagcaggccgtggctcttgaccaccatgatgttcaggcggtaattcgggttgtccagcacccgcgcatcgcgaccggcgagcaagtcgtcgagcatgcgctggcagctctggctgacctcggccatggtcacgcctttggcaaagcgctgttcgttgtacaggcggccgaggtccagcaggccttgcaccgggtcgggcaggcacgcgctggcaaaccgccaggagccgatggaggcaccgatcagggcgcgttcccgtggcgcacggggcagccagtcgccgaacagcgccaggtccaggccctggatgccgagtgccttcgggccgccggccgcgccgggcaggatgcccacctcggcaggcgtgaggccttgttcacgaatgcgcgcaaaggcgcgtttgccggccttgagggtcagggcgggaaacttgatgtggatggctgtcataccggtctctgtccgagcgagcggggcattatagaaaatctcgtggaatgtagggcaaaggccttggcgggaattgccatggtggcaattcagtttcagttaagttgcagggcgtacggtggccggcgtagtaaaacatcctgtaacggagacttatcatgaagcgcctcaccgcgctggccgccgccggtatcatcgccttcacggcgacccaggcccgagccgtggaccccgacaaaccactgaaagtgccggccactgttactattgtcgctttcgatcaactggaagctacggccctggccctgcatcccggttcgacattgctggacaccgacctcgacgaggcctacggcaagtacgtgtatgaggtcgagttggaagatgcccacggcatcgaatgggacgttgaattggacgcgctcaccgggcaggtcctcaagaatcatcaggatacgtaatgaaggtaaatttacgcgtcggcagtcgagtggcgctggtgctcttggcattctgctccagcctggcggcccgcgacctcaaccaggatgaagccttggcgctgcgccagcagggggtgatcctgccgcttgagcaattgttgcagcaggccatggcgcgttaccccggctcgcgcctgctggaggccgagctggagaagaaacacggccaatatgcctatgaagtggaactggtgaccaccgaaggtgtggtgcgcgagatcaagctggacgcgcgcaccggtgtgttgatcaaagacgaggaagactgatgcgcctgctgctggtggaagacaacgtacccttggccgatgaactgatggctggcctgcagcgccagggctatgccgtcgattggctggccgatgggcgcgatgccgcgtatcagggccgcagcgaaccctacgacctgatcatccttgacctcggcctccctggtctgcccgggcttgaggtgctggcgcaatggcgagccgccgcgttggccgttccggtactgatcctcaccgcccgcgattcctgggccgagcgcatcgaagggctcaaggccggcgccgacgattacctggccaaaccctttcaccccgaagagctgcacttgcgcatccaggcgttgttgcgccgttcccacggccaaaccaaccagccgacgttgcaagcggccggcctgcacctggacgaaggtcgccaatgcgtgctgcgtgacggcgatgagatccagctgaccgccgccgaatttcgcctgttgcgctatttcatgctgcaccccgaacagatcctgtcgaaaagccacctggccgagcacctctacgacggcgagaccgagcgcgactccaatgtgctggaagtgcacgtcaaccatctgcgccgcaaattgggccgcagcgtgatcgagacccggcgcggccagggttaccggtttggcgccagccctgcatgaggtcgatccagcggcgcctgagcctggggctgatcagcgtgatggtgatcgtcggcgtggtgttggcccagaccagcctgtggttgttcgaggccggcttgcagcgctacctggaagctggcttgcgcaacgacgccgaaaacctgctggtggcgctggtgcgtgggcccaacggtgtgcagctggatgagcaacgcctgtcgccagcctatcaacggccgttttccgggcattacttccgcatcgattttgccgacgtccactggcgctcccgctcattgtgggaccaggaactgccgcgcctgcccgaggcggggctgaagggcaacctgcaactcggcccagaaggccagcaactgctggtgctgcgtgcggactacaagcggtttggccaatcgatttccatcagcgtggcccaggactacaccccggtgcgcgaaagcttccggctgatgcgccagatcggcctggtgctggggctggcggcactgctgttggtgttgatcttgcaacgggtgaccgtgcgccgcgccttgcgcccgctggaaaccgcgcgcaaccagattgcccagttgcaacaggggcaacgctcgcaactcgatacccaggtgcccctggaactggagccgctggtggcgcagatcaaccacctgctggctcacaccgaagacagcctcaagcgttcgcgcaatgccctgggcaacctcggccatgcgctcaagacgcctttggccgtgctgttgagcgcggcatcgagcgagacgctcaggcagcatcccgaactgagcaaactgctgcgtgatcagttggagcaggtacagcaacgcctcaaccgcgaactcaatcgcgcccgcctggccggggaaaccttgcccggtgcgttgttcgactgtgataaagaactgcccggcctgctcgccaccctgaccatgatccacggcgagcacctggacctgagctaccgcgccacgccgggcctgcaactgccctgggaccgcgaagatctattggaactgctcggcaacctgttggataacgcctgcaaatgggcggatgccgacgtgcgcctgagcatcaccgagacggagcaccattacctgttggcggtggaggatgacggccccggcattcctgaaagccagcgagcccaggtgttcagccgtggcgcacggctggacgagcagatcgatggccatggtctgggcctggggatcgtgcgggatattgtcgaggtgtggggcggggtgttgcagttgcaggcatctgaactgggcggcttgaaagtgctgatcgaattgccctgtgggagggggcttgcccccgatggcggtattccagtcaaaaaacagattggctgatacaccgcaatcgggggcaggctccctcccacattggatcgccttgcattttcagacgcggaactgatccatcaacccctgctgctgattcgccaggctgttcaacgcctggctcacccgcgccgattcattcgcctgctcggacagcgactcggtcacatcgcgaatggtcgccacgttgctgttgatctcctcggccaccgcgctttgctcttcggcggcgctggcgatctgcaggttcatgtcgctgatcaccgttaccgcatcgccgatctggcgcagggcggtcacggcctgtccaacctgttcgacgctgccctgggcctggcggtagctgttgcccatggaaccgaccacttcttcggtaccgctctgcaactgctcgatcaccaggcgggtttcttccaccgactcctgggtacggcgcgccaggttgcgcacttcatcggccaccaccgcaaagccacgcccggcttcaccggcgcgggccgcttcgatggcggcgttgagtgccagcaggttggtctgctcggcgatgccacggatcacctccagcaccgagccgatcttctcactgttggcggccaggccttcgacctgggtcatggccgtgctcatgtccgccgccagctcgccgatgttggtggtggtgcggtcgatcaccgtgaggccgtcgcgggtggcctggtcggcatcgcgtgcggcctgggccgcttgtgccgcgctgcgggccacgtcctgggcggtggcgctcatttcgtgggaggcggtggccacctggtcgacctggcggtactgctgctccatgccggcgctggtttgcgtggcaatcgcggcggattggtcggcggtgccacgagcgtcctgcaccgagcgtttgacctcggcgatgatcggctgcagcttgtcgaggaaacggttgaaccagccggccagttggcccaattcgtcctgtttgtcgtaggccaggcgccgggtcaggtcgccttcgccgctggcgatgtcttcgagcatgtgcgccacgccgaggatcggccgggtcacactgcgtgccatcaaccacaccaggatcaagccgaccacggcggccagcaggcccaggctcagttccagcagggtgcccttggcattgtcggcatccagttgggttttcagcgcttcggcgggggctaccaggactttctctggcacatccagcagcacgccccacggcttgccgtccggaatcggtgcgaacggcgcgagcaccttgagctggtgatcggtgcgcaggctgcgaatttgtgtactgccggtcagggcgctgatcaactgcgcgccgttggcggtgtcgacctggtccaggcgctggctgagcttgctcgcgtcggggctgtagccagcgagcaaaccagtcgggctgaggatgctgacctgggtctggccgtcatacagcttgtggctggcctgctggctcacggcctgcaggctgttgaggttgatgtccaccgacagcgaggcgatgactttgccgttggccatcaacgggaagacaatgctggtcatcagcacgttttgtccgttgatcttgtaaaagtacggttcgattacgcacggcttgagcgtggtgcgtgggcaggtgaaccaggcgttggccttttcgccgctggggccgatgctggtgtcggacatgtcgctttccggcagcgacatggaggtcaactggccaggcgtcggttgcgaccagtagagggcgaaacgccccttgtcgttactgcccaactccgcctggccggcgaacagttcatccttgccgtccagcgcattggcttcgaataccagggacaaaccaagcaagtccgggttggcctgcaacgcggccctgacctggcgggtcaggtcttcgcgggtgtcgaaggcgtcgagaaagcgcttctcggcctgctcgcgcaggaacagcacctggcgcgaaaaaccatggccgtactgataggcgtccatgaactggcggcggatacccagcgcttgcacctcgccctgggcttcgatgcgcgcctgggccgcttcatccagcatctgcatgctggaggccttgacccgttgcgaactctgctccatgcgatacagcgacagacccaccagcagggtcacgattcccagcaggcacaagccagcgagcagggtgattttccattgaatggagagctgcctgagcgacatcggtacatccttacctgaaaacacagagagaacctgtatcggcggtttcaggtttttctttattcaaacgatcgatttaaacctgaaagcggcgccgttttttgacatgtgcgcctgcctgctgcaaagtgcgcgccctctaataagacctcctccaagcctgcacgccggttgccacccaatggctgcccgggtgcgggcatgcctgttttttatgtttttttcttgaggtaaccatgattaacgcagtcattgccgcggtcggcaccatgctggtgctcagcctgtcccgcgtgcatgtggtcatcgccatcatcgtcggcgccctggtgggcggcctgaccggtggcctggggatcgaagccacgctcaaggccttcaatggcggcttgggcggcggggcgacggtggcgttgtcctacgccttgctcggcgctttcgccgtggcgattgccaagtccggcctggcccacgcgttggccgacaaggccctgctgctggtggaccgtcaggaaaccagcggtggcagccacgtcaaatggctgctgatcggcctgctgtggatggtggcgattgcctcgcagaacatcttgccgatccacatcgcgttcattccattgctggtgccgccattgctgtacgtgctgaccaagctgcaactggaccgccgcctgatcgcctgtgtgatgaccttcggcttgatcacgccgtacatgttcctgccggtgggcttcggcaatatcttcctcaaccagatcctgctggccaacgtggccaagagcggcgtggatatcagccaggtcaacgtcactcacgccatgagcctgccggcgctgggcatggtcgtcggcctgctggtggcggtgttcatcagctaccgcaagaagcgcgtgtacgatctggagaaaatcgagcgggtcgagcaggtggcggtgcagtacaacccgctgaccctgctggtggccggcctggcgattgcctcggcgttcatcatccagttgtggctggactcgatgatcatcggcgctctggccgggttcctgatcttctcggtgtcgggcatcgtgcgctggcgcgacaccgacgacctgttcaccgaaggcatgaagatgatggcgatgatcggcttcattatgatcgccgcgtcgggttttgccgaagtactcaaggccaccggggatgtgcgctcgctggtggaaacctcggcggccttcatcggccatagccgtggggtaggggcgttgctgatgctgctggtagggctgctggtgaccatgggcatcggctcgtcgttttccaccgtgccgatcctggcggcgatttttgtgccgctgtgcgtgcaactgggtttcagccccatggccatcgtgtgcatcgtcggcacggccggtgcgttgggtgatgccgggtcgccggcctcggactcgaccctggggccgacttccggcttgaacatcgacggccagcaccaccatatctgggacaccgtggtgccgaccttcctgcactacaaccttccgctgctggcattcggctggctggccgcgatgaccctctgaccgcagcgcccttgttgtggtgaatgggcttgctgtggtgagcgggcttgctgtggtaaatgggccgttgtggtgagcgggcttgccccgcgttgggcggcgaagccgccctaatccagccaccgtgatgtatcagaaaaaacgaggtgcctggatttggggcggctgcgccacccagcgcggggcaaggccgctcactacagaaacctcctacgcggccgttaacctctctagtcgccactaataagagagaaaacccatgcgtctgagcctcaaggccaaagtcctgtccctcgccgtagtgccggtgctgttgtttgccgtggtcatcagcctgaccaccgtgtggatcctgcagggccaggcgcgcaatgaggtggaagaaacccgtcagcgcctgctcaacgacgccaaggccaccctgcaaagctacgtcgaagtggccatgaccaccatcaagccgctctacgacgcggcggcgcccggtgataccgcggcgcgcgccgaggtggtcaagctgctgtccaacaccagctacggcaaggacggctacttcttcggctacgactccgagaccatccgcctgttcaagggcaacagccccgacggcgtgggcaagagcttcaaggataaccgcgaccccaacggcgtgtacgtcaatcgtgacctggtcaaggtcggcaaggacggcacccattacctgcaatacagctcgacccaaccaggccagaccgaactggtgcccaagatgggttacaccgaatacctgcccaagtgggacatggtcatcggtacctcggtgaacctggacggcatcgaagcccaggtggcggtggtcgaggccaaggtcgagaaacgcatggaaggcgtgctgctgagcatcctcggcgtggccgtggtggtactgctggtgatcgctgccgtgggcatgctgctggccaataccattttgcgtccgttgcacctgatgaaagccaacctcgacgacatcgcggccggcgaaggcgatctgacccgccgcctggccatcaccagccgggacgagctgggcgatctcgcgggtgcgttcaaccgatttgtcgacaagatccacggcctggtgcgccagatcaccgagatgacaggccaactcaccggtctggtcagccaggtgtcagaccaggcccagcgctccgaacaggccatggaacgccagcgccacgagaccgaccaggtcgccacggcgatcaaccagatgtcctccgccgcccaggaagtggcgcgcagtgcccagggcgcctcggtcgcggcccagcagaccgacgctgaaggtcaggccgccaagcgcgtagtggacggcagcatcgcgcagatccatgcgctggtgaacgacatccgcagcagcggtgtgtccctcgacagcctgcagcaggacgtggcctccatcgtcagcgtgctcagcgtgatccgctccattgccgaacagaccaacctgctcgcgctcaacgccgcgattgaagccgcgcgggccggggaggccggccgtgggtttgcggtggtcgccgacgaagtgcgcgccctggccagccgcacccagaccagcacccaggaaatccagggcatgatcgaccgcctgcaaaaaggcactgaagccgcggtggacgccatgcgccgttccagcgatgccggcgacggcacctcggcccaggccaaccaagccggggcatcgctggacaccatggcgcagttgatcggcaccatcaattcgatgaacgcccagatcgccagtgccgccgaggagcagaccgccgtggccgaagagatcaaccgcagcgtgcatcagattgccgtggcggtggacagtgtggccgatgagacccaactgggcgcccagacctcccgcagcctcgcggacctgggtcagcgcctggggcagttggtcggccagttccggatctgatccagcggttgtgcgccgcgacgcataggcggtgtcacgtcatctggatcagcgtcttcatgatcgtgctttcggtggagatggttttcgcgttcgcctggtagttgctctgggccttgatcaagtcgaccagttcgttggtcaggttgacgttggagttctccagggcattggccttgatcgcgccgagggtgccggcttgcggggtgtcatagcccggttggccggaggcgaacgtctctctccaggcggtgccgccggccggttgcaagccttgttcgttgttgaagctggccagggaaacctggccgacggccttgctctgctggttgctgaaggtggcgaatagcacgccgttgccgtcgattttcaggccggtgatctggccggtggcatagccatcggtgaccggcgggttacggtagctggccgagttgtactgggtgatgttggccaggttgacggcgatgccggttgggttggcatccgcaccgttggccttccacacgccgttggtcaccgtcccggggacccagccggtgagggtcagggtcttgtcggatacgcctgcggttacgacgctggtgagcttgcccgcgccgtcaaaggtcaacgtggacggcaccggtggcgtggacggtgtaccggtgggcgccgagccgttcgggttgcgcccgtcgatcagggtgtaggcgttccatttgttgccgtcggttttcaccaggtactgcaccatcgggtgggcattgccctgggagtcatacagggtggtgctgtactgggtgctgaaggtgctggtgtcgttcgggttgaacggcttggccacctggtcgatcacgggcatcgacgcattcaggttgctggtcgaatcgactttggtcgacgccttgggcggcaggctggccaggttcaattgcaggtcgaccaggccgcccttggcgatcttgccgttggcgtctgccccgtagccttgcaggcgcgaggtgccggtgttgttggtgatgtagccgtccttgtcggcgcggaaggcgccgctgcgggtgtactccagcgaaccgtcgcttcttttctggacgaagaagccgccgccctggatacccatgtccaacgtaccgccggtggtgttgacgtcaccctgggtgaaccgttgggacaccgccgccaggttcacaccgttgccgatgctgttctggccggtgcccagccgggtggcggcgtagatgtccgcgaattccgcacgggatgccttgaaaccgctggtcgcgacgttggcgatgttgttgcccgtgacgtccatctgcttattggcggcgtggagaccgctaaggccaatattgaaagacatatcaactccttctggtgccgtttctggtcgaggctggggaagggctgagtgtgcgcaccgcgcatggacgttcgggggaggctgtgtggagaaagcatggaggccgggatttatttacccggcgccccctcagagatcgcgcatcaataggccgaaacgcaggtccatcgcggccgggagtggcaggtacacggtgtgcccatcccccggtgcgacctcgatggcgtggcccttggcgttgtgcagggtggccaggtcgaagtggaagttaccggcgggcgtcatcaattcaaggtgattgcccacggtgaagcgattcttcaccttgacctcggccagctcgccccggcgctcgccggtcagttcgccgacgaattgctggcgttccgacaccgagctgccgtgctggtagttctggtactcatcgtgcacgtgccggcgcaggaacccttcggtgtagccgcgttgggccagggattcgaggtcggccatcaggctgcggtcgaaggcgcggccggccaccgcatcgtcgatggcctggcgatacacctgggtggtgcgtgcgcagtagaagtgcgacttggtgcggccttcgatcttcagcgagtgcacgcccatgtgggtcaggcgctccacgtgctgtaccgcgcgcaggtccttggcgttcatgatgtaggtgccgtgctcgtcttcgaaggctggcatctgttcatcggggcggttggcttcctgcaacagaaacacctggtcggtcggcgcgccgatgcccagggtcggctcgcagtgctggacgatatcgccggtggcgttttccaccgccggtgtggcctggtatttccagcgacacgcattggtgcaggtgccctggttggcatcgcgcttgttcatgtagcccgagagcaggcagcgcccggaataggccatgcacagggcgccgtgcacaaacacctccagctccgtggccggcacctgttggcggatttcgtcgatttcttccagggacaactcccgcgacaggatcacccggcagatcccttgctgctgccagaactcgacgctggcccagttcaccgtattggcctgtaccgacaggtggatcggcatctgcgggaagtgccggcgcaccagcatgatcagcccgggatcagacatgatcagcgcatccggacccatggcgatcaccggggccaggtccttgaggaaggtcttcaacttggcgttgtgcggcgcaatgttcaccaccacgtagaaacgcttgcccagggcatgggcttcctggatgccgagggccaggttggcgtggtcgaactcgttgttgcgtacccgcaggctgtagcgcggttggccggcgtacaccgcatcggcgccataggcgaaggcgtagcgcatgtttttcagggtgccggcgggggcgagcagttcgggggcgaggatggaaggcatgggcacgggtcgcaaaaggtcgcgaaggtagccgagcggcgagggcggttcattgatccaggtcgtgctttgcgcatttttgtatcgctgtgtatcgacggcggctgtggatacgtatcgatttatccgcgcggttttccgacacaggtgcgatacctcatgcggtcttaatgggcttcccgtatccataaggtgatcaccatgctcttcgtcgcattcctgggcggcatcctgaccgttctcagcccttgtatcctgccggtggtgccgtttctgttcgccggcgtcgaccgcagtcgccgttcgatcctgttgaccctcggcggcatggcgctgaccttcgcactgatttccagcctggcggtggtcagtagcgaatgggtgatacaggccaataacaccggccgccatgtggcactgatcgtgatggggctgtttgcgctgtcgctgatctcggcgcgtgtcggtggctggctggcgcggcccttcgtgttgttgggcaaccgtatcgatcctggcaatcgcacgctgtccggcccgctcaagtcgctcatgatcggtgtcgccaccggcctgctgtgggcgccatgcgccgggccgatcctgggggtgatcctgaccggcgcgatgttgcaaggcgccaatgcgcagaccagcctgctactggtggcctacgggctgggcagtgcgttgtccctgggcacgctgatttttgccgggcgtggcctggtcaatcgactcaaggcgtccattccgctgaccggttggctgcgccgtggggcaggggtggcggtactggcggcggcggtggtgatttccaccggagcggacaagaccctgttcgctggcacatcgtccgaaggggttagcagcctggaaaaaggcgtgctggaaaacgtgcccaacgtggtggattacgtggtgagcaaggtcaaggccgatccgcaggacaatgcacggggtgccatgccgtcgctgggcggcgcggtcgagtggctcaattcacctgaactgacccgcgaatccttgaaaggcaaggtggtgctggtggatttctggacctacgactgcatcaactgccagcacaccctgccgtacgtgaaggcctgggcgaaaaagtacgcgcaggacggcctggtggtgatcggcgtgcataccccggaatacggctacgagcgcatcatcggcaacgtcaaggagcaggtgcgcaagttgggtatcacctacccggtggcgatcgacaacaactatgcgatctggcgcagcttcgataaccagtactggcccgcccattacctgatcgacgccaacgggcaggtgcgcgacacgcattttggtgaaggccggtacgaggcccaggagcagatgatccagacgctgttgaatgaggccaaggccacgcagtgatagggtctacgcttgttcgatcaccaacggcactcccaggaatcgctgcggactaagcaacagggccgataccggccctgtgcttttctgacatggaccggacatgaatcaaaccaacctgcaattcaagaccctgctgttgttgctgggcctggtgaccgtcgcgtttatctggatattgctgccgttctacggcgccgtgttctgggcggtaatcctcggcattatttttgccccgatgcagcgccgcctgcagcagcgctttggctggaaccgcaatttcacttccctggcgaccttgagtgcctgcctggtcatcgcgatcctgccggtgatcatcaccagtgccttgctggtgcaagagggcgcgacgctctacaagaacatcgagagcggcaagctggatgtggccgggtatatcgagcagttcaagaacgtgttgccgccgtacttccagcacctgctggaccgcttcggcatgggcaacctggagggcctgcgcgagaagatcgtcaagagcgcgatgcagggcagccagttttttgcgacccaggcgttcagcttcggccagggcacgtttgatttcctggtgagctttttcatcatgctgtacttgctgttcttcctgctgcgcgacggtccggagctagtgcgcaaggtgcgcacggcggtgccgctggccgagccgcagaagcggcggctgcagctcaagttcaaccgggtggtgcgcgccacggtcaagggcaatgtgctggtggcggtgacccagggtgccctgggcgggctgattttctggttcctggacattcccagtgcgttgctctgggcggtgctgatggcgtttctgtcgttgctgccggccgtgggcgcggggattgtgtggggcccggtggccgtttacttcctgctgagcggtgcgatctggcagggcgtggtgctggggctgttcggcgtgtttgtgattggcctggtggacaacgtgctgcgcccgatcctcgtgggcaaggacaccaagatgccggactacctgatcctgatctcgaccctgggcggcctgtcggtgtttggcctcaatggctttgtgatcgggccgctggtggcggcgctgttcatgtccagttgggcgctgttcgtggagagcaagccgcgagtcaaactgccactaccctgaacatcaggcgtggagcttgaacgtcgaggtgtgttgcagttgtttttcggcatcggacagggaggtcagtgggccgctgatggcttccccatcgcgtaccaggtaccagcaggcgagcagacccagcttgcgaagcggggcggggacggcgctgccgatgacggacatgatttgtacagtgggcataaagacctccaatcgctgttgggggcactttacggcgcaggctggcgtaggaaaaatcaactgtctcgatagtcgacatcgacgcgaggcgtcagtccacgacctgatcaagcatgttcaccacttcctgctcactgagcagccccttgcgcaccaggttttccgcgagcaacgcgaggaacttggcgctgcggtggccttccaggtgcttgagttccgtgagggcgctgtagaccttgctggacgtacagaggccggcggtgcggtgcgggttttgcgtgggcatggtcagtcgtccttgttgttattgggtggacaatctcgatagtgggagtgtttcgtgacacaaacatgacagcgcaaggcctgttcgggcaagtagacattggtgttgatgatgtgcgattacgcgctgggcattgtccccagagcgaccttgacgccctgaatccggactttccaggcaaaaaaaggccccgcaatcacgcgaggcctgtttcgaacgatctggttaccagccgcggccatagtaaccgtgaggagggccgtagtagccacggggcggaccgtaatagccacgcggtgggccgtaatagaccggcgccgggcggtagtaaacctgttgctgcacatacaccggcggtggcggtgcgtaataaaccggcggcggcgcggcatataccggttgcggttgcacatacaccggctgctgcacatagacctcacgcggctggctggcaaccacggagcccacgacagcggcgccgactaaagcacccaatacggccgggccaccccaaccaccaccgtgggcggaggcttggcctgccatcgcgagtgcgccaaccagcaaggcgatcttggggattgtacgaatcatggtcattcctcggttagccccagcgcttgtggtctgcaatcaatagactcaagtaatgtcgcggggatacttttaagacaacgtatttctgaaaaacagcacggccgctaggtaaaggttgtgtaaggtctgtaccgatttgcttactcaaaggagttacccatgcagatgcaccccaacaaggacacccaactgtgcatgtcgctgtcggcgcgccctgggaatttcggcctgcgttttcataaccatctgtacgaacagctgggcctgaacttctactataaagccttcagcagccgggatttgcccggcgcgattagtggtatccgggcgttgggcgtacgcggttgcggggtttccatgccgttcaaggaagccgccattgccttggtggacgaactcgacgattcggttcaagccatcgactccctgaacaccatcgtcaacaccgacgggcacctcaaggcctacaacaccgactacatcgccatcgagcagttactcaagaagcatgcggtgccaaaggactcgaccttcgccctgcgtggcagcggcggcatggccaaggccgtggccagtgccttgcgcgatggcggctacgcccatggcgtgatcgtcgcgcgcaacgagactgcgggccgggcgctggcgcagaacctggggtatgaatggcgggaggaactgggcgacctgcgcccgcagatgctgatcaacgtgacgcccatcggcatgacgggcgggcctgaggcggatgcattggcattcgacgccgatgcagtggattctgccgagacggtgttcgacgtggtggcgatccccgccgaaaccccgttgatcgtgcgtggacgtgcccaaggtaaacgcgtgattaccgggcttgaagtgattgcgatccaggcgttggagcagtttgtgctctataccggggtgcgaccgacgccggagcagttcgccaaagccgtggcgttcgcccgaacctgaagaaccccgaatatcatatgtgggagggggcttgcccccgatagcggtagctcaacaatgaaattattgactggcacaccgtcatcgggggcaagccccctcccacattttttccgcgttacagcggttccaatttggccagccgctcttccaacagtgcaattcgcgcttcgagttcttcgatgcgttcgacagacacgccactgacacccccgcgctccatcggattgccccgcgccgcgatgatcgcctcgatatccgccggatcgcccaatgcatgggtataacgatcttcacgctgccccgcctggcgcggcaccagcaacgccagcccccgcgcaatcaggcgttccagctggtgcacgacctgctcggcatcttcaaaatcatgcatgcgcccgctgcgcgtcagcagttcattgacggtttgcggcccgcgtaaaaacagcagcccggtcaggatcacctgggccggcaccagttccagcgccttgtctacacggtgttcccagcggtcggcacggctgcccatcaccaggcgggtgaaaccctggccttcgagtgcgcgcaggctctggccgacctggcccggactcaggttcatcaccggctcgcggctggtcttctggttgcaggccagcaccagggcgttgagggtcagggggtaggtttccgggttggtcgcctgtttttcgatgaggcagcccaggatgcggatttccgtgctgttcaggcgcggctcaggggtgtcggtgtcgtgctcggcggtcatcgcgcgttccctatgcagtggaggtccttagcctaagccggaaaaaataaaagacaagcgcccggcatgtctataatcgccgctggttcaaaccgtgccataaccatgagactgccatgactatttccctgtacgccgcctccatcccggtcttcaagcaaatgctcaccgccctgagcggtgtattgaccaaggccgaagcccacgccagcgccaagaacatcgagccgaacgccttgctgcaagcgcgcctgttcccggacatgttccaactggtgcgccaggtgcagatcgccgtcgacttcgccaagggcgtttccgcgcgcctggccgagatcgaagtgcctaagtacgaagacagcgaagtgaccttcgccgacctgcaagcgctgatcgccaaggtcctggcctttgtcgacaccatcacccctgagcagatcgacggcaaggaaggcatcgagatcatcactcgcccaggcacgccgaaagagaagcgcttcagcggccaggcctacctgctgacctacggcctgccgcagttcttcttccacgtcaccaccgcttacgcgctgctgcgccataacggcgtggaagtgggcaagcgcgattacatgggcgctttctaagcacgcataaaaatctatggtcacccccatttttgcaatactgattaacgggtggtgtggttggcttgcttaaatctatccggcgtctgtttggggcttgccccagcgccacgatgagagtc

SEQ ID NO: 3 - DNA, 326617 bp, Pseudomonas nodulensis
  misc_feature (190287)..(190362): n is a, c, g, or t
  misc_feature (264053)..(264130): n is a, c, g, or t
tgtttgccgagatcgatcccgatcagtgctgactcgctcatgatgatggcctccgaaaacaaaacaccctgtgaaagcgtagccctcacagggtgttgggggtgaccatctcattaaccggggcggttcttgtaggaaccgtcccggtttttttgtgcgcgacggttaagccggctgttcttccttgcccaggcacgcggcggcggtgaacaacacatcggtggacgaattcagcgcggtttccgccgaatcctgcaacacaccgatgatgaaaccgaccgctaccacctgcatcgcaatctcactgggaatgccgaacaggctgcacgccagcggaatcagcaacaacgaaccgcctgccacgccggaagcaccgcacgcacagatggccgcaaccacactgagcagcaccgcagtgggcaggtcgacggcgatgcccagggtgtgcacggcggccagggtcaacacggtgatggtgatcgccgcgccggccatgttgatggtggcacccagtgggatcgacaccgagtaggtatcttcatgcaggcccaggcgtttgctcagcgccaggttcaccgggatattggctgccgaactgcgggtgaagaacgcggtaatgccgctctcacgcaggcacatcagcaccagcgggtaagggttgcggcgcagtttccagaacacgatggccgggttgatcaccagcgccacgaacagcatgcagccgatcagcaccaccagcaggtgggcgtagccgagcagggcaccgaagccggaggtggccagtgtggaggcgaccaggccgaaaatgcccagcggtgcaaagcggatcaccacgcgcacgatcagggtcacaccgttggacaggtcttccagcaccgcccgcgtggtcggcgcggcgtggcgaatggcaatgcccatgccgatggcccacgccaggatgccaatgaagttggcattcatcagcgcgctgatcgggttgtccaccacgctcagcaacaggctctgcaacacttcgccgatgccgccgggcgcggtcaccgctgcgtcatgggtcgccagcaccagcgaagagggaaaccacatgctggcaaccactgccaccacggcggcggcaaaggtgcccagcaaatacaggaacaggatcggcttgatatgggtttcctggccatgcttatggttggcaatggatgccatcaccagcacaaacaccaggatcggcgccacggccttgagcgcggaaacaaataccttgccgataaacccggtggagcgtgccacttcggggagcagcagggccaacaggatgccggcgatcaggccgatgacgatttgcgtgaccaggctgacgcgggccaggcgttgcaggagagagggggcagcagtcataaacacttgtctctagtttttttagggcgcagctactgactcggaaagggctgtaggacgcggatcgcgaagtctagcatgctgtgggaaaagtccttggcggtgcggcattgcgtcacccgcttgcccaggccttggccaaatctggacatactctgataagattctgttctctcatctttcctctccgtcagcgggcccttcgggttgtcgttgatgtcgtcgtttctggagttttcatgttgtttcccatcctgctgctgtcagccgccggctttaccgtgctgaccacagaattcgtgatcgtcggcctgttgccgtccatcgcccgcgacttgaatgtcagtgtgtcccaggccgggctgctggtgaccttgttcgcgtttaccgtggcggcgtttggtccgtttctgacggcgtactgtgcacgtttcccacgcaagcgcctgtttatcagcatcctgatcctgttcggtgtggccaataccgtggcggccctggcaccgaacatctgggtgatggcgctggcacggttgatcccggcgctgggtttaccggtgttctgggccctggccagcgaaacggcggtagacatcgtcggccccgaattcgccgggcgcgccatcgagaagatcggctttggtatcgtctgcgccacggtattcggcattccggtgggcacgctgatttcagatatgttcggctggcgcagcgcgtttgccatcctcgcggtgatcgcgctggccaaggccttgctgctgtctatctacctgccggtgacccagccgaagaacgatgaagtgacgttgcgcgcgcagttcaagatcctgcgcaacccgctgatgcaggggcatatcctgctgtcgatcctggtgttcagcggcatgttcacggcgtacacctacctggcggacatccttgagcgcctggccgggttcgacggcacgctggtgggctggtgcctgatgggcttcggtgcggtcggcctgatcggcaattcgctgggcggacgggcggtggatcgccacccgttgatcgcgtccatggtgttctgtgggttcatgatcgccggcatggtcgcgctggtgccggcgattcattcgagcatcggcctggcggcggcgatggccgtgtggggcgtaacccaggcggcgatgttcctggtcagccatgtgcgcctgatgaaggccgcgccccatgcgccagcgtttgctgcgtcgctgaacatcgccggggccaacctgggcatcggcctaggcgccatggtcggcggccatgtgatcgacaccctcggcctgggcagcctgggctttgcggcgtccgggtttatcctggtgtcgatcctgctggcgttgtggctgatgaccgccaagcaaccgctcacctccggcgcctgagccgtcagggcagggtggtgaatagctcgcgccgggcaccttcggtaatcgccacgatgccggggtgcttgaccttgcgttccaccgagatcgcgtagaacgactcggtcacggccacggtttggccgatcagcgccacgccgtactggcgcaccacctcgtcggcaatcacgctgggggcgataaagatcccgctgccggattggccgaatgcctgcatcaaggcgctgtcgtcgaactcgccgatgatcttcggttgaatctgttgctcggcgaaccagcgctgcaaacggctgcgtaccacggtttccgcgcccggaatcaatagcggcgcgccgtgcaggcactgcgggaaatcccctccgtattcgtcagccagggcctgggtggcgaaaaagctgatgccacattcgcccaacttctggctgtagcccttgatgtctaggtgcgtgggcatggggctgtcggaaatcaccaggtccaggcgctggattgccaggtcggccaacaggcgttcgagtttgtcttcgcggcaggtaatgcggatcggctcgctcaactccatggtcggtgcgatcagccggtagacgatggacttgggcaccacgtccgccacgccgacgcggaacaggatctgctgttcgtcgggctgcgcgcgcagcatcgcctccaattcattgccggtctggaacatctgctcggcatagggcagggcctggcgcccggcttcggtcagttccagctgccggccaacgcgctgaaacagcgcgataccgaaggtttgctccaacaggctgatctgcccgctgatggtctggggcgtgaggttcaactgctcgcacgcacgcacgatgctgccggtcttggccaccacccagaagtagtgcagttgtcgataattgagcatgctcaccatcacatcgtaaaaatcgaagtatacgcgagaaaaatacgaattttactgaactgtttgcctgcatagaatgcctcgctatcgcggggccactatttggacccaagagttctaacgaggaagacatcatgaaactcaattctctgggcgcggcatccttgcttgcgctttcattggtagtggtcagtggttgtgatcaggtcgagaaaagcgcacagcaggtgttgggcaaggccaccgaatcggccaagcaagcgatcgatgacacccacaaggctgccgaacaggcattgagtgaagcgaccaacggcctgatcaacccgcagaagaaggatgatcaggaagagaacgaaaccgaatcgaacagtaaagaagcctaaattcccgctcaacgtcaggactgacctatggattaccttttacaactggccgccagccccaccgcctggattgccctggcaaccttgatcgtgatggagatcgtgctgggcatcgataacctgatcttcatctcgatcctcaccaacaagttgccagaaaagcatcgggccaaggcgcgacgcatcggtatcagcatggcgttggtgttgcggttgggcctgctcagcaccatcgcgttcatcgtgcaactgacggcgccggtgttcgaagtgttcggccaggcgttttcgtggaaggacatgatcctgatcgccggtggcctgttcctggtgtggaaggccactaccgagatccatcacagcatggacccggagcctgaagagaaggaaaccaacgccggcaacgtcgtggctatcggctttgccgcggccatcgggcagatcctgttgctcgacctggtgttctccatcgacagcatcatcaccgccgtgggcatgaccgagcacttgccgatcatgatcattgccgtggtgacctcggtgatcgtgatgctggtggcggccgaaccgctggccaagttcatcaacgacaacccgaccgtggtgatgctggccctgggcttcctgatcatgatcggcatgaccctgatcgccgaaggcttcggcgcccatgtaccgaaaggctacgtatatgcggccatggcgttctcggcagccatcgaatgcttgaacattgcccggcgtaaccgccaccagcgtttgctcgctgcccggcagtaaccgctgaaaccaaacggccggctgcgctcagatgagtccagccggctttttgctgtctgttagaattcgcgcacttgatagcgtgaggtcctacatgaacgagccgattcgtcttacccagtacagccacggcgcggggtgtggctgcaagatatcgccccaggtgctggaagtgatccttgccggcagcggcgcacagaacctcgaccccaagctgtgggtgggcaacgcctcgcgtgacgatgcggcggtctacgccatcgacgacgagcgcggcgtggtctccaccaccgactttttcatgccgattgtcgatgaccccttcgatttcgggcggattgccgccaccaatgccatcagtgatatctacgccatgggcggcgatccgctgatggccatcgccattctgggctggccggtgaacgtgctggcgccggagattgcccgcgaagtgatccgtggcggccgttcagtgtgcgacgaagctggcattcctctggcgggtggccactccattgatgcacctgagccgatcttcggcctagccgtgaccggcatcgtgcaaaaacgccatatgaagcgcaacgacacggccaccgccggttgccggttgtatctcaccaagcccatcggcatcggcatcctcaccaccgccgaaaagaagggcaaattgcgcgaggcggatatcggcctggcccgcgactggatgtgcactctgaacaagcccggcagccgtttcggcaagttggcgggggtaacagcgatgaccgatgtcaccggtttcggcttgttgggccacctggtggaaatggctgacggcagcggcgtgaccgcacgtatcgaatacgccaaggtcccacgcctggccgggatcgaggactacctggatcagggctgtatgcccggcggcactttgcgcaacttcgatagttattcgagcaaggtgggacgcttgcaggaactgcacaaacgcgtgctgtgcgacccgcagaccagcggcggcctgttgatcgccgtcacgcctgagggcgatgccgaattccacagcgtggcgactgaactgggcctggtcctggaacctatcggcgaactggtcgagcgacagacccacgcggttgaggtgatttgatggcaaccgatatcaccgactaccgcgacattttcctcaacgaccggccgatgatggatacccgcgcgccggtcgaattcagcaagggcgcgttcccgggggtgatcaacctgccgctgatgaccgacgacgaacgccagcgcgtcggcacctgctacaagcagcagggccagcaggccgccatcgtgctcgggcatgagctggtttccggcgcaatcaaggccgagcgcatcgagcagtgggcgcggttcgcccaggccaaccccgagggctacctctactgtttccgtggcgggctgcgttcgcagatcgtgcagcaatggctcaagaccgaagccggcatcgagtatccccgtgtcggtggcggctacaaggccatgcgtacgtttttgctggagaccgtcgagcacgccgccacgcagtgtgacttcgtgctgctgggcggcatgaccggtactggcaagaccgaagtcctcggccagttgcgcaatgccctggacctggaaggccacgccaaccatcgtggctccagcttcggcaagcgcgccacggcgcagccgtccaacatcgacttcgaaaaccgcctggccgtggacctgctgaaaaagcgtgccgcgggtatcgagcagttcgtggtcgaggatgaaagccgcatgatcggcagttgcgcgctgccgctggcgttgcacaagggcatgcagacgttcccgatggtgtggctgcaggacagcgtagaggggcgggtcgagcgcatcctgcgcgactatgtggtggacctgtgcgccgaatttgtcgaggtgttcggcgatgccggccaggcgctgttcgccgagcgcctgacccagagcctgggcaatatccataagcgcctgggcggcgaacgcttccagcgcttgcaggcgatcttgcaggcggccctggcggagcaggcccgcagcggtgatgtgcacctgcatcgcgcctggatcgaagggcttctgcgtgaatattatgacccgatgtacgccttccagcgtgaaagcaaaggcgcacggatcgagttcgcaggggagcagggcgccgtggtggaatatttgcgcgagcgcgcgctgatcagaggatagccgcgccgatcaacccacacaccacccccaccaacatcgttaagcctgccaccgtcaccagcacccgcgcatcgaagtccttgcgcagcatcagcagggacggcaagctcacgctcggcagggtcatcagcaaggccacggccgggccggtgcccatgcccagggtcatcatggtttgtacgatggggatttcggcagcggtgggaatcacgaacaacgtgccgacaatcgccagcggcaccagccatactaggctgttggccatggcgccgtcgacatgggggaatagccacacccgtgcggcacccaggatcaacacggccaggatgtacaccgggatcgtgctccagaacaactgccacagggtccgcagccaacggccgaggaacggctgggactcaaccgcgctgacctcggccactgcgcccagcgccgcttccggcacctggtccgggcgggcgatacgttgcgcgatcagcgacacgcccaccaccagcacaatgcccgccaccagccgcaatgcggtgaagccccaacccagcacaaagcccatgaacaccagggtcgccgggttcagcaccgggttggcgatccagaacgcgagtgccgcgcccaccgatacctgctgccgacgcatgccggccgcgaccggagccgcgcagcaactgcacatcatacccggcagggcgaacagcccgccgcgtacagtcgaacccagcccggcacggccgaacaggcgcagcagccagtcgcgggggatcagcacttgcaggagggagcccaggatcaccgccagcacggcagccttccagatcgccaggaagtacacctgggcatacgccagcgcagccgccagtggcgagctttgctggtcgttgagaatcgaggcgccaatgctgtggttatcggcggcgacgaaggccttgaagtaatagggcgaccacttcacgtagtagaggccgacgcaggcgaccagcaggaacagcgctggtttccaccagaacgaccagccccggttgggctgggtggaggcgaggttgggcatggtgatgatccgcagatgagtcaatagcggcgcatcatacgccctcagctctcggcgctcacctgggtaggttgcgggcaggtttcttcgccattgttcaggccctgcttgtagttgcggctcagcagcgaggccttgccgttgtgccaggtcagtgtcagcacatacagcgtgtcgtagtcgctgccggaccagtcgtcggtgatggtgtgtttttcgccggacgcttcgctcgccaccttgttgatcagctccggcaggtagccgtgggaccaggcggtgtagatgatggagttgtggtacttgtcttcgaccagctcgtcggcgagggcactggtgtcattcgcggaaaacttgatgttgaccggcaggccgagcttgatcgcgctggggctgatggtcatcagcgggcgaatatagctgtaggaattgtccagctcgccttcctccacattgcgtgtcgggttggcggcgaagacgaaattggccttgccgaacttttctggcaaaaccgtggccaggttcatcgcccggttgagaccctggcaattgagctggcccaggccaccggcgggtttttcaccgtggcgcaggaagaccagggtttgcacgccgtcaacctggtcggcgttgctgatccgtgactccaggctcagatcgatagcgccgccgaccaacaatagcggcaacaaaatgtaggaatagcgtttcagtcgttgtactaggcgcagaggcttgatcgtcattgtaggttcgagtcttcatgcgtcacgttaaggcagacacgcctggccacgatgacgcctggggcgcctgcggtgttccatgtcgaaataacgaggtgcctccattcaccgcttgagcgcagttaagagtgcccaagggcgtattggttcgccctaacgggataatagccagcagttgttgcgtattgatgacccatgcaggacgctcgccagatgactatcatgggggctttcagcacacacatagggcttcccgatgaacccacttgccgctttcccgatcaatagcaaatggcccgcccagcatcccgagcgcctgcaactgtactcgctgccaacccccaacggggtaaaagtgtcgatcatgctcgaagagctcggcctgccctatgaagcgcataaagtcagcttcgagacccaggaccagttgtctcccgagttcctgtcgctgaaccccaacaacaagatccccgcgatcattgaccctaatggccccagcggccagccgctggcgttgttcgagtccggcgcgatcctgatctacctggcggaaaaatccagccagttgctctccgaggacccggcgacacgttatgaaaccattcaatggctgatgttccagatgggcggcatcggcccgatgttcggccagctgggcttcttcaacaaattcgccggcaaggcctacgaagacaagcgcccgcgtgaccgttacgccgccgaatcccggcgcctgctcgacgtgctggaaaaacgcctgctgggccgtacctggatcatgggcgacgagtacagcatcgccgacatcgccacctttccgtgggtccgtaacctgatcggtttctacgaatccggtgacattgtcggcattgccgactttccaaacgtactgcgcgcgctggatggtttcgtcgcacggccggcggtgatccgtggccttaatattccgagttgaagcatgccgactttcgatttcaaacagctggacgtgttcagccgcgtgccgctcaaaggcaacccgctggcagtggtgttcgctgccgacagcctcagcgaccaacagatggcggatttcgccaactggaccaacctcagtgaaaccacgttcttgctgacgccgcgtgatcctcgggcggactaccgggtacggattttcaccaccttgacggagctgccttttgccgggcatccgacgttgggcagttgttatgcctggctgcaggcagggggtgttcccaagggtgaggagataatccaggagtgcgaaatcggcttggtgcgtatccgtcgccaaggcgatgaactggcatttatcgcgccgccgttattgcgcgccggtgccgtggacgcgccgttgctggagcgtgtgcgcctgggcttgggcctggagcccggggtcattgtgcgcagtcagtgggtggacaatggcgccggctggctcgcggtgatgctggcagaccgcgaccaggtcctggcgttgcagccggactatgcgcaactgttggggctggccgtgggtgtgatcggcccctgtgaagccgggcgcgacgatgtggacgcgcaatttgaagtgcgtgcctttatcgccggcgacggcgcccaggaagacccggccaccggcagcttgaacgccggccttgcgcaatggttgctcagcgagggcctggcccccgagcgctacgtggtcagccagggcacggctattggccgggcagggcggatcggcgttgagcgccagggcgatgaaatctggatcggtggtgctgtttcggtgtgcatcgacgggcgtgtacagctctagatcaataaattgttaccgcccacgcaatacactattggcccctcggcgtttgtgctgccggggcctgggggcataagctttcgccccaaagattttctgccttgcgataggaccaccatgaccagccagttcccccaagcccgtccacgccgcctgcgccgctccccggagctgcgtggcctgttccaggaaaccgaattcaccctcaacgacctggtgctgccgattttcgttgaagaagaaatcgacgacttcgtgccgatcaccagcatgccgggcgtgcagcgcatccctgagaagaaactggccggcgagatcgagcgttatgcccgtgccggcatcaagtcggtgatgaccttcggtgtgtcccaccacctggacgccagcggcagcgacacctggaaggagcgcggcctggtctcgcgcatgtcgtcgatcatcaaggatgccgtgccggaaatgatcgtgatgtccgacacctgcttctgcgaatacaccgaccatggccactgcggtgtgatgcacggcgcccatgtcgataacgacgcgacgctggttaacctcggcaagcaggccgtggccgctgcccgtgccggtgccgatgtcattgccccttcggcggcgatggacggccaggtccaggcgatccgccgcgccttggacgatgcgggcttcacccatatcccgatcatggcttactcgaccaaattcgcctcggccctctacggcccgttccgcgaagccggcggcagtgcgctcaagggcgaccgcaagagctaccagatgaacccgatgaaccgccgcgaagccgtacgcgaatcgctgctggacgaacaggaaggcgcagatgcgctgatggtcaagccggccggtgcctacctcgacatcatccgcgacatccgcgaagcctcccgcctgccggtagcggcgtaccaggtgagcggcgaatacgcgatgatcaagttcggcgcccaggccggggcgatcgatgaggaccgtgtggtgcgtgagaccttgggctcgatcaagcgcgcgggtgcggacttgatcttcacctacttcgcgatggacctggcgttggccgggatctagaaccacaacaggtaaaatgtgggagggggcttgcccccgattgcgttggatcagtctacacatacagtgactgatactccgtcatcgggggcaagccccctcccacgtcaaccatgcccggcccgtcgtcgcccaaggaagccccatgtatccacgccgcctgatcctgtgccttgccacgtcgctggtactggccggttgctccaccacgcgcaacccgcaacagccgcagcgcagcgaggccgaggtgaaggcgcaggtcgtgcgcctgctgccggtcaaggtggctgatcgcgagggctgggcccaggacatctacacggccttcaacacccagaacatctaccccagcacggaaaacatctgcgccgtgctggcggtgaccgagcaggagtcgacctatcaggtcgacccgccggtgcccaacatgggcaagatcgcccaggacgaaatcctgcggcgtgccggcaaagtccatgtgccggcgtttgtcgtgcgcagcgccctgcaactgcgctcacccagcggcaagacctacgccgaccgcctcaatgctgcgcgcacggagaaggacctgagtggcatcttcgatgacttcatcagcatggtgcccctgggcaacacgttgtttggtggtttcaacccggtgcataccgcaggcccgatgcaggtgagtatcgactttgcacagaaacaggcgcggagttatccctacacggtggatggcacaattcgtcgcgaagtcttcacccgtcgtggcggcatgtacttcggcatcgcgcacttgctgggttacccggtgagctacgaccggccgctgtatcgctttgccgatttcaatgccggttggtacgccagccgtaatgccgcgttccaggctgccgtcagccgcgtctcgggcaccgaactggccctggatggagatctgattcgctacggctcgctgctgcccggcaccaccgagttggcggtgcgttcattgggcgcgaagctggacatgcgcaaccccagcatccgtagccagctggagcagggcgagcaactggatttcgaggaaaccaccctgtacaaacgcgtgtttgccctggccgacaaggccgccggcaagccgatgccacgggccatcctgccgggcatcgtgctcaagagtcccaagatcacccgtaacctgaccacggcgtggtttgcccagcgggtggatgagcgctatcagcgctgcctgaagcgctgatcaggtgcggcgtttgacaaaacgccgccacagccacacccacaaccacagcaccgggaacgccaggatcacgaacggcagcacatagcttgatcgctccaacgcgtcggcggtgccgtcgaccaggttgtcgcccaggttgctgaacaccctgctgaaccgtgattgctgattcgcaccatcagaggagcggaaattcagcgtcacccggttagtgtccaggcgacgttgctggctggcagcaacctgggccagttcctgtagctcgttttctatgccggcctgttccttgctcaaggcgatcaggtcactgacggtgatgtccttgcgcttggccaactcatccagtcgttgttgttgagcctgcaggcggtcctggcggcggcgtacgtcggcgacggcatcggccaggtcctcggcggtggtgatgcgctggccgagtgtgccgccttcagccgccatggcgaccatcggttcgacaccggttggcgcgatgcgcaggatgatctggccgccactgccgtcttcggtgatgccgaggatattgcaggcgccaaagcgcgcggtttcgcaggcttcgcgggtggcctgcatgcgcggcgcgagcagtgcaccaggcagggccaggctcagctcatgctcgtaggccagttgcgcgcccgcgcggctttgttcgccgttgattacccgtgcgcgggactgatccttgggcgaacagccggcaacggccagcgctgccagcaggaacaggagatagggttttggcttgccgtccagatggcgcattgcgattccttggcaggtacgggggaatttgacggcgattaaagcgggtctgatggattaacgcaaagcatcggaggggatttgtgcggctgatggtgatggccgttgtctggcgccaggcgtacacctcaagcctgacaccaaggaagaattcgccatgatcgctcacgccgtgcccgaagggtttgtctcgttgccccgcagtagcccgctgcttgacctgcttggcccggcgtattgccggggagaagggctgcaactggaaatcggcctgcgtgccgacaaccgccacgccaatgggcgcggtaccgtgcatggtggggtgttggcaaccctggcggatatcggcatgggctacgcgatggcgttttccagtgagccgccgctgccgctgattacggcgagcatgaccgtggactacctgggggcggtgcaggtgggggagtggattgtggtgcgcctggagcatcacaaacgcgggcggcagatggcgtttgccacggtgagcctgcaggtgggggagaaggtgatggcgcgggcgaatgcggtgtttgcggtgccgcagacgcgagattgaagggtaaagaaaaggcctggttttcgtggaaccaggccttttctgcgttgctcttttttctagagggctgctgcgcagcccgacgcggggcaagcccgctcgccacagcaagctagctcaccacggcgagcctgcgcctaccgtcaggcgcgttcgagggcgagggctacgccttggccgccgccgatgcacagggtcgccaggcctttcttggcatcgcgcttgatcatttcgtgcagcagcgttaccagcacgcggcatcccgaggcgccgatcgggtggccgatggcgatggcgcccccgttgacgttgaccttgtcggcgtcccattccagctctttgcccaccgccagggattgcgcggcgaaggcttcgttggcttcgatcaggtccaggtcgcccaggctccaaccggctttgtccaggcaacggcgggtggccgacaccgggccgatgcccatgatcgccgggtcgacgccggcgttggcgtagctggcaatgcgcgccagtaccggcaggccgagggccttggccttgtcggcgctcatcagcaacaccgcagcggcgccgtcgttgaggctggaggcgttgccggcggtgacgctgccgtctttcttgaacgccggtttcagcttgcccagggattcggcagtggtgccggcgcgtggctgttcatccacggcgaaggccaccgggtcgcctttgcgctgggggatcaggatcggtgtgatctcatcgacaaaccgccccgcctcgatagcggcagcggctttctgctgggaggcagcggcgaacgcatcctgggcttcacggctgatgccgtacttgtccaccaggttctcggcagtgatgcccatgtggtaatcgttgaacgcgtcccacagcccatcggtgatcatgctgtcgatcatcttggcgtggcccatgcgcaaaccggtgcgcgcggcgggtagcacgtacggagccaggctcatgttttccatgccgccggcgatgattacctcggcgtcgccgcaacggatggcctgggcgcccaggtgcagggccttgaggcccgagccgcagactttgttcaaggtcaggctgggcaccgcgtggggcaggccggccaggatcgacgcctggcgcgccgggttctggcctgagcctgcggtgaggacctggccgaggatcacttcatccacttcggccgggtccaggccggtctgctccagcaggcgacggatcacggcggcgcccagttccggtgccggaatgttcgccagcgaaccctggaagctgcccacggcggtgcgggtggcagcaacaatcacgacgtcttgcatggaatctgtcctcactggaagtgcatttctggaacgtggtccgggacgatcagtttaccggcggtcttgctcactatctcttcaacgctgacgccaggtgcgcgttccttgaggacaaaagcgccattttcgatttccaggtacgccaggtccgtcaatacgcgcttgatgcagtgggcgccggtcagcggcaggctgcattggctgagcagcttggactcaccgtccttggacgcatgggtcatgatcacgatgatgttttccgcaccggccaccaggtccatggcgccgcccatgcctttgaccagcttgccggggatcatccacgaagcgatgttgccttgtacgtcgacttcaaaggcaccgagcacggtaaggtcgacgtggccgccacgaatcatcgcgaacgactcggcggacgagaagatcgacgcgccgatacgcgcggtgacggtctgtttgccggcgttgatcatgtcggcatcaatggtttcttcggtaggaaaaggacccatgcccagcaggccgttttccgattgcagcatcacttccatgccttcggggatgtagttggccaccagggtcggaatgccgatgccgaggttgacgtagaagccgtcctgcatttcgcgggcgacgcgttgagccatttgttcgcgggtaagagccattttatgtgtccttattgttcgggctggaggcggattacttgcgcacggtgcgctgttcgatgcgcttctcgaacgtgccgcagatgatccggtcgacgtagatgccaggggtgtggatctgcgccgggtccagctcgcccggttcgacgatttcttcgacttcgaccacggtgatcttgccggcggtggcggccaacgggttgaagttctgggcggtgtggcgatagatgacgttgccgaagtggtcggctttccagcctttgacgatggcgaagtcgccggtgatggattcttccatcaggtacgggcgaccgttgaattcgcgggtttccttgccttcggcaaccggggtgccaacgccggtggcggtgaagaaggccgggatgccggcgccgcctgcgcgcattttctcggccagggtgccttggggggtcagcaccacttcgatttcgccgctgagcagttgcttctcgaacagggcgttttcaccgacgtaggaggcgatcaccttgctgatctgtttttgctccagcagcacgcccaggccaaagccgtcgacgccgcagttgttggaaaccacggtaaggtcgcgggtgcctttgcgcttgatctcggcaatgaggttttccggaatgccgcacaggccaaaaccgccggagagtacggtcatgccgtcctccaggcccgccagtgcttcctcgtaggacgccacgcgtttatcgaaacctgccatatgcacctcttttattgtttgtgggccagccaatgaatcgagtgttgctccgtcggattgatttgttaagttgttttttaaggttgattgatttaaaaaacagcatagttgcctggccgtttggagtagcgtcatgacagttaaacagatgcgcgcgtttctcgctgtggcccagagcctgagtttcgccgccgcctgcgagcgcctgcacctttcacagtcggcgctgagcctgaccatcaagggcctggaagaaggcctgggtgggcggctgttcagccgtaacacacgcaatgtcgcgttgacgcccgaaggtgaatcgctgctacccctggcacgccggctcattgccgattgggacaatgccgaggacgaactgcgccagcgctttaccctgcaacgcgggcgggtcacggtggcggcgatgccgtcgttcgcgggcaacctgctgccgccgatcctgaagatattccgcgcgcgttaccctcaggtgaatgtcaccgtgcacgacctgatcaacgaacaggtgctggaaatggtccgcgaccgccaggtggagctgggcgtggcgttcgagccttcagacggttcgtcgctggcgttcacaccgttgtatctggatcgcttcattgccgtggtgcccggggattcgccgttgattgagcttgatgaaatcgactggaaaaccttgctggagcagccgttcatcactttgcagcggccgtccacggtgcgggtgatgttggaagagcaccttggtgctctacagatgaagctgccggtagcgctggaaagccatcaactggcgaccgtaggcaagatggtggcgatggggttgggtgtcagtgccgtccctgcattgtgtgcgcggcagatggaggaggcgggggctcattgcatcaccttgcgtgatccggtgatcgaacgaccgattggggtgctgaccaaacccggtcatgaactctcggcggcagcgcaggtgttgtttgatatcttttgcgacgaagcgaagaagggacgatttcccgcagtgtgatagagccgaaattaaaaagcccgctcgaatgaacaagcgggcttaagtagttaatgcggtgttatcagcagtatctatcaatcactttaacttgcgattggcccttgaggttctgccattcggtattaagtgtgtggaagacctgttcgataaagttgcgatcggcggccgccttcttgccgacataaccctggccacggcggtacatcttcaggcgcgccgccagttcacggttattgcggtcaaactcggcttcttcggtgtggggcgccaggcagtcaatttgcacttcgcccgatttgccaatccacaggatatggtcgtcgagtgtgtctttctgcgctgcgaacatctcagccaattcatcgatagttggttggttgttcagattcatgtgtaagccccttgaccagttggcgatctatcagttggttcgttaatacttcgtaagttgtctccggttgcgaaaaccgggcgtcagcgactgtctgccgaatacgggcagggtcttgaacctgatgcatgtagtcttgctgatgaactgctacgcaatgctttcataacgaagacaagccgcatttgagcgccttgtaccgaacccttcgggccggtcagcttcatcaatccgccttgtgggcagtgcacatccggaaaaaacagctcggcggtcagacgagcttgttcaaaacgcttgttgccaacgctcccgatccgggagacgtctcgataatgcaaggacaaaatggttacgtcaacggttatgtagtgattatttttgctcactacataaattgccgtggggacgggagaatgcgggaaagcgtgacttgggcgtcattttctggaagtacaggtcaggctgtctaacgcctgttgtggcaagcccactcaccacaacaagcccgctcgccacaaaggacctgcgcttgattgagttaccgtaaccgttcgaccaaacgcggcaaaagccgctcgcattcggcttcgatcttcacctgcaacaactcatccccccgagtcttgcccaagttgatggcaatgaccggcttgccctgttcgaccatggccttgcacaagcggaatgccgaataggccatcagcgacgaaccgactaccagcaagccttcggcatggtcgacggcggtcatggctctggctgctgtcgccggtgctacgttttcaccgaaaaacaccacatccggcttcaagcgctcgccatcgcaatgggggcagtgggggacctgaaagtgttcttcaaaggcaggatcaagcaacgtgtcgccatccggcgcctgcaccgcatggacctgcgcaaggtaggggttgtcgatttccatccggcgctggatcacatcgcgtgcactgcgcaaccggcaatccaggcacagcacccggtgcaggctgccgtgcagttcgatcacatcgtggctgccggcctgatcatgcagggtgtcgacgttttgcgtgattagcccgctgatacgcccgtgttgctgcagcgtcgccaacgccaggtgcgccttgttcggctgcgcaatgcgaactctcggccacccgagcatcgcccgcgcccagtaacggcgacgtgcctgcgcggtggcgaggaactcctggtacatcatcggcgccttgccccggcgcacgccttcactgtcgcggtagtcgggaatgcccgacgacgtgctgatccccgcaccggtcaacaccagaaagtgccgttcggccatggcccgatgcaaggtgtcgaggtgatcctcttggtgttccagggtgtcgagcatgggttcccctattcgccgcggatgtactgctccagctgtctgatcaggtcagcctggtcggcaatggcttccttgaccaggtcgccgatggacagcagccccaacagcttgccgtcttcgaccacgggcaagtgacgcaggtggctgtcggtcatgatgttcatgcactcatcgacctttttgtgggtgtcgacggtgataaccggggaactcatcacctcatgaaccttggtggtgaccgacgacaggcccttgagcatgattttgcgggcgtaatcacgttcgctgatgatcccgaccaccacgccatcctgaaccaccggcaaggccccgacgtttttctccgacatccggaccagtgcttcaaacacggtgtgatcgtgtttgatgacatggacttcctggtttttctggtccttggctttgagcacttctgcaacggttttcatggtggccactccggtattgttgttggttagtcagggtcccactacagaatcctagaccggccaccgcgctgcaaggtccaaagcggcgctaaacccgtcaaaaaacgtcattcaccggtttttttcagtgtttaccccgcatttgtcggttttttggcccgcttggggctggctgccgtcttgcgcggtgcgctcttgcgtttctttttccatggcgtggcacctcggcctgccgggctggcgggaccggtgatggtcatgcgcatgccattgcagcgggcgacctgcttgctcatccaggccgcctgtttggcgacgaagtcttccaggctcatttcgccgctttgcaccatgtccagggcctgctcccagatggcggtggtgcctgggtcggcgatggcccggggcacggcgtcgatcaggctgaatgccgccggagtggctgatagcgccttgccgttcttcaccaggtaaccacggtccagcagcccctggatgatgccggcgcgggtggcttcggtgccgatgccggtggtgtccttgagtttttgcttgagcagcgggtcttcgaccagcttggcgacgttcttcatcgccttgatcaggtcaccttcggtaaagggtttgggcggttgggtccataggtccttgaggttgaccttgtccacggcatagtcctggccttgcatcaatggcggcagggcttgcggagccggtgcttcacgtcccttggccggcgccagggcttcgggcagggcgcgtttccagcctggttcgatgaccactttgcccactgcacgcaacgcaaaacctgcgcaatcgaaatccgcctgggtgcgatcgtactcatgattgggcaggaactgcgccaggtagcgtgcacgaatcagggtatacaccgcccggtgcttgccggtgagttgtcccacgtccttgccggcgccggtggggatgatgccgtggtgggcgctgaccttggcgtcgttccacgcccgcgagcgtcgctggggatcaatatgcggcatcagttcgttcactgcagtatccgcgcgcgccaacgcagccaggatcttcaatgcgtcgctgtgctggctcatcggcaagtagccgcaatcactgcgcgggtaggtgatggctttgtgggtttcatacagcgactgggcgatatccagggtttcctgggcgccgaggccgagcttcctggaacagatttcctgcagggtgcccaggtcgaagggcaggggcgccacttcgcgcatgcgttcggtgcgcagcttcaccagccgggcgctggcggcgttggtcatggcgtcggccgcgtcccgcgccaactgcgggttgaggcagcgaccctggtcgtcacaggcgtcctcggccgcgcgccattgggcggtgaaagtcatgcgttcgtggtgcaggtcgacgtcgatggcccagtaagccaccggcacaaagtcggcgatgctgcggtcgcggtccaccaccaggcgcagtgtcggcgtttgcacccggcctacgggcagcacgccctggtagccggactggcgcccgagcaaggtaaacaggcggctcatgttcatgccgatcagccagtcagcacgggagcgacccagggccgagtgatacaggctgaaggtctccgcgcccggtttgagcgccccgagggccttgcggatcgaggcatcatccagcgccgacagccacagccgctggatcggcccacggtagcggcaatgctccaccagttcgcgcgcgatcatttcgccttcgcggtcggcgtcggtggcgatcaccagcgcctgggcttcccccagcaggcgcttgaccgccttgaactggctggcggtcttgggtttgacgcgcatcttccatttttcagggacgatgggcaggtcggccagtacccagcgcttgtacttttcgtcgtaggcatccggcggggcggtttccagcaggtggccgatgcaccaggtgaccgtgaccccattgcccagccagcacccgtcgccacggcggctggcgccgagcacggccgcgatgtccttggcctgggagggtttttcacagaggtacagccgcatggtcgtcacatcagatcgggttgatgctgtgcaggatgctcagtcagcgcgcattgatcaaccattatctgtatggatgtacagcaatttatgtaggcacctgaaggcacatgtgggagggggcttgccccctcccacagcggatcttctgtgctcaggagatcggattagttgttatcgatatccacgtgacgggtctctttaaggcacaccatccccacgatcaaactaaccccggtcaccaccaccgggtaccacaggccgtagaagatatcgccggtgtacaccaccaaggcaaacgatacggtcggcaggaacccgccaaaccagccattgccgatgtggtagggcagggacatcgaggtgtagcggatgcgcgtcggaaacagttccaccatcaacgccgccagcgggccgtagcacatcgcggcgatcaggatcagcgccacgatcagcaccaccaccatggtcttgttgacctgggccacatccgccgaagacgggtagccagccagggtcaccgcgccacgcagggctttttcgtcaaaaccgtcgatacgcacttcgcccacgctcacctgcaccgggctgccggcgggtgcggcggcgctgctgtagggcaggccttgcttgaccaggaaggtcttgaccttgtcgcacgggctgtcaaatttcgccttgcccaccgggtcgaactggaaggtgcaggtggccgggtcggccatcacggtgatcggcgcctggttgctcgccttgtccatcgctgggttggtgtagtgcgccaggctcttgaagatcgggaagtacagcacggtggccagcagcaggccgagcatcagcaccggcttgcgcccgaccttgtccgacagccagccgaagaagatgaagaatggtgcgccgatcaccacgctgatgatcaacagcatgttggccagggccgggtccattttcaggaattgcgtgaggaagaacagcacatagaactgcgctgcgtagaaggtcactgcttgcccgccgttgatgctgaacaaggcgatcagcaccaccttgaggttttcccatttgccgaaggactcgcggatcggcgatttgctggccttgccttcctctttcatcttcaggaacgcgggcgactcgtgcaggctcatgcggatccaggtggaaatgcccagcagcacgatggaaaacaggaacggaatgcgccagccccacacttcgaactggtcaccggtgaagtagcggcaggccagcaccaccagcagcgacagcagcaggccgatggtcgcggtggattgaatccaactggtgtggaagccgcgtttgccggccggtgcgtgctcggccacgtaggtcgccgcgccgccgtattcgccgcccagcgccaggccttgcagcatgcgcagcacgatcaggatgatcggtgccgcaatgccgatgctggcgtaggtcggcagcaagccgacacagaaggtcgccacgcccatcagaatgatggtcaccaaaaaggtgtacttgcgcccgatcatgtcgcccaaccggccaaataccagcgcaccgaaggggcgcaccacaaagccggcggcaaaggccatcaaggcgaagatgaacgccgtggtgtcgttgaccccggcgaagaactgcttgctgatcaccgccgccagggcgccgtagaggaaaaagtcataccactcgaacaccgtccccagggacgaggcgaagatgaccttctttgagtcgttgctggtgctcgcgtcgatcgacgagcccaggggttgagcatgttctgacatcgggtagccctcacagtgattatttattgttgttccactgtcggcgccaggttcggcgccgctattcagattgcatgaaccagttctttctccggggcgagactccttgtattcggcgaaaggatcagctgcgcggccttctccgcgatcatcagcgtaggtgaacaggtattgccggacgtaatgcgcggcatgatcgacgcatcggcgatgcgtaaaccgggcacgccgtgcacccgcagttgggcgtcgaccacagcgtctttatcgctgcccatgcggcaggtgccgaccgggtggaagatcgtcgttccgatgcgtgcggcggcttcgtgcaattgcgcttcggtttgcagcgcatcacccggcaggtattccaccggcttgaactggctcagggccggtgcggcgacgatgcggcgcgtcaagcggatggcatcggcggccacgcgcaggtcttccggatggctgaggtagttggggcggatcagcggtgcgtccgccgggttggccgagcggatgtcgatacggccccggctctgcggacgcaagtcgcagaccgaagcggtaaacgccgggaatgggtgcagaggttcgccaaatcgctcaagcgacaacggctgcacgtggtactccaggttggccgaggtctgttccgggccggagcgggcaaacgcacccagttggctgggcgccatcgacaacgggccgctgcggtcgtacaggtagcgcaggcccatgcccatcttgccccacagggtgccggcgatctgattgagggtacgggcgttttccagtttgtagatcagccgcagttgcaggtggtcctggaggttgccgccgacgccgggcagctcgtgcaatacattgatgcccaacggtttgagcacattcgaagggccaattcccgagcgttgcaggatgcccggcgaacccactgcgccggcgcacagtacaatctcctggcgcgctttccagctcacttgctggccctgctgacgcccgaccacttgggaggcacggccgttttccagcagtacgcggtccacctccacttcggtcagcacggtgaggttggggcgctggcgcaccggcttgagaaacgccttggccgcgttccagcgcaccccggctttctggttgacctgaaagtagccgcagccttcgttatcgccctggttgaaatctttgatgttggcgatgccgctctgcgccgccgcatcgcggaacgcatcgaggatcggccagtgcaggcgctgctgctcgacccgccattcaccgccgtcgctgtgaaactccgagccgccggcaaagtggttttcgctctgcttgaacagcggcaacacgtccttccacgcccaaccttcattccccgcagcggcccagccgtcgtaatcctgggcctggccacgcatgtagatcatgccgttgatggacgagcagccgcccagcaccttgccccgtggataactcagtgcacggccttgcaggccttcctgggcttcggtcttgaagcaccagtcggtgcgtgggttgccgatgcagaacaggtagccgacggggatgtggatccaggggtagttgtcgcggccaccggcttcgagcagcagcacgcgatgtgcggggttggcggacagtcgattggccagcaggcagcccgcggggccggcgcctacgacgatgtaatcgtattcagcagttgcaatgggcatctgaaggtctcgcttgtttttcttattggccccatcctagttgttagttttcgtcttaaaaatgttagtttttgcccagctgctgtgcgtttttaaacagtgcagcccagggataggcaatggaggcgtcatgttcgactggaatgacctgcggtactttctcgagttgcagcgcagcggtcgcttgctcaccgccgcgcaacgcctgaaaaccacccacgccactgtggcccggcatatcgaggcgatcgagaaaagtctcggcaccgcgctattcgtgcagcatgcccagggctacgaactgacccccgccggcgaggccctgctaaaacatgccgaggccatggaaaacgtcgcactgctggccgaagacgagctgactcatgctgccgcgcccctgggcaagatccgcctgggtgtggccgaaggcctgggcgtgatgttcctggccagccgcatgggcgggctgttcgagcgctaccccgggttggaagtggagctggtggcggtgccgcgctttgtcagcatcctcaaccgcgaagcggaaatcagcattcacctcgagcggccgagcgtcgatcaactggtcacgcgcaaacttaccgactaccggctggccctctatgccagtcgcgcctacctggcgcgcaacccgccgattgaaaagcgcgaagaccttgcagcacacgcctggatcgattatgtcgacgacctgctgttcagccaggaactcaaattcctcagcagcttctgccgcaaccccaaggtggtgttccacagcaccagcgtgatcgcccagcatcaggcggcgcgctccggtttggggattgcggtattaccgtgcttcatggccgccggcgacccggacctggtgccgttgctgccgggggaggggatccagcgcagctactggatcagctcgcgccgggaattgcacaagtcagtgcggctgcgggtgttgtgggattacgtggtggagttgtgcgcgcgtgagcaaggcttgttgctgggcgaagccaactgaagaaaccggatcgataccgtggagtcattgaaccccgtcaggcacgcaactcaaactcggcactgcccagcctttccccattcacccacacatgcaccacatgccgcccagggtaatgcttgcgggttgtcatgtcgcgaatgtgctgttcgcgccgaatgtgctgctgttccccggcacccaggctgaacgccttgagtttgaataccttgtttgcactgtggccggcgcttttcacatagtcgatggcgtagtccaccaccagcttctgtggggctgtggcggtggattccagggtgaaggacagattgatccgctctcccaggttgatcaccgccggcgtcacttgcagatggtggatcttcacgtcggccctggccccggcccccatgatcgtcagcgcacgcgtgttgccttgcttgatcaggctgcgcagcgcgtggcgggcgatccaggcggtgtgagggttatccagattccaaccttcgatcaggctgagcacccactccgggtggtccttggtgatgtcgttgaggtggttggccactgatttgcgcacgtacaggctgctgtcggccttgaggttgtcgaggatcgacgcacacagttcggggttggcctgtacttcggccaggcggaacgaccagggcaagcgcggccgcgaaccttcgctggccaggcggcgcacgtgttcgttggtatccagcgaccattcgtgcatcaccgccaacgtgcgcgggaagtcgtgcagtagaaaatggcggatcgcgaattcggcggagccaaacgtcgtgaagtacttgagcgcggccattgaacgcttgaaatcatcccgaccgtaactcgccacgaagtgcggcaggaacaggctgacaaacgcgctgttcaagcgcggggccaacgcataaagcaccttgagggtttgcgggtagtccagtgggatcaccgcatgcaggctctcgctgacccgtgccatgcgctgcatcaccgacagctcggccagcccggccttggcgtgcttgagaaagcccttggcgtcgaacgccgggtacaccgccgtcatctcgctggcgatgtgttgcaggcgttcgacgttgaagatttccttgagggccggggcgctttggtcggtcatcggtgattccgtaggtgatgtcagagaaaccagcgatattcccgcgcatggatctcttgctggaaggccaggtggtcctggcgtttgttttcgcagtacacgtcgacaaattcggcgcccagcttatcgcgcaatactgcttgatgctgcatggcacgcacggcgtcgagcatttccagggggaagtcgctgccgctgctgcggtcttcattcagcggggcgatgggttcgcgcctggcttcaagaccgtgttccaggccgaccaggatcgccgccagcaccaggtacgggttggcgtcggcactggccaggcgatgttcgatacgcaggttgcgcgggtcggattcggggatgcgcacgcacgcgtcgcggtcttcaaagccccagctggcgcgggtggcggcgttgaccgtaccgcccaggcggcggaaggcattgtggttgggtgagaagatcggcatgcagtgcggcagcaattccaggcagccggccacggcatgacgcagtggttgctgctggtgtgccgccagcaaattgttacccgcgccatcatagaggctgacatgcacgtgcatgccactgccggggaattgcaggtagggcttggccatgaagctggcgcggtagccgtgtttcaatgccacgccacgggtactgcggcagaacagggcggcccagtcggcagcgcgcatcccatcgtcgaggtggccgaagttgatttcgaactggccggggccgatctcggcggtgatcacggtgatatcgatgccctggtccttggcggtttgcgccatgtcatccagtacttcgctgaagcgcgacagccgttcgatatgcaggttgggctggtcgtcggcatcatcgctcagcgggtcgcgggcaaattgcggcaggccgttgtcgagtttcttgtcgaacaggtagaactccagttcaaacgccaccaccgggtgaatgcccttgtgttgcaggcgttccagcaccttggccagcacttcgcgcggttcgaactcgatgggcgcctcggtgccgtccgaggtgatcagcatctggcccagcggctgcgactcccagctcaccggcttgagcgtgcccggcaccaggcggcggttggcatccgggtcgccgtcgttgaagcagtagtcgccaattttgaacaacccgccctgaacccccagcaacaccgcgttctgcggcagcttcaacgggctgccggcggcgactttttccagcatctcgatggggtagcgcttgccgtagaagtgcccgggaatgtccagggcgatcaggtcgacataacgcacgtccgggtgattctggcgaaaggtccgtacttcggccagtaacgtggaggcatggcttttcacgggtgttgctcctagttgtaaacccacaacacgcgggcgggcaggtcggtcaggttggcgtagcggcagtgggcgaaactggccaggtggaagctgtcgccggggccgagggtgactgagccgtcttcaccctccacccataacgtcaactcgccctccagcacaaaaccggcttgttcggcgcggtcgctcatggtctgttcaccgctgttggcaccgggggccagcaggctgtcgagcatcgagaaggcgccgttcatgctcggcgaaacgaggatgtcggtgatgccgttggcgtaatacaccgtgcgccgctcgttggggcgggtgatccagtccacggccttgggtttgggctggctgtagaagtaggtggtgggcacgtcgagggcgtggctgatggcggtcaagtcggccacggtcgggcgcgacaggccgcgttcgacctgggacaggaagcccaccgagcgctcgattttctgcgcgagctgggcgagggtgagcttcttgtgcttgcgcaggtcatggatcagcgcggcgagggtggcgagttcttcttggggtgtcatgaaatttatgtcgaataatttcatgaaaaactacaggaattatttcatgcgggcaatcggcaccttcaccgtagcaccggcattggggtccagccctttcaaggttttcaggtagaactggcgacaagtaccctgtggcgagcgggcttgtcccgcgttgggctgcgcagcagccccataaagatcaccgcagcgcatcaggtaacctgcggcgacaggttttggggctgctacgcagcccaacgcggggcaagcgcgctcgccacagttgcagtgttcgccctttatggaagggtatcagccagatagggccggtttttcaggggcggaagataaagggtttcacgccccaggtgcctgtcagttctacgccgccgaccaacagcagcaggttcccctcgtcgcgcgcttgaatcagtgcatcgcgcagggcataccgttgtccttccaggttggccggtgtgggtgcttgagggttgtactgtttggcggacagcttcggggagtgggtcttgcgcaatgtcagccaataccaggtcggtcggtctgggcgccgaaagatcaactcggtgctgtaccgcgagtcgaagacttcgtagtggctgtctgtcagcagttcgcgcatcagcgttttgatgttgatttgggtaggccgctccaacaggtttgaaaccaggacgggacgtaccccagccgtatcgaaccgtatgaggttgaactcatttgaaacccccaatgaccactcgaatggccctggccctctcggcaaggtgggcagcagtgccaacggatcgttcgcgatcagagtgtgccgctgggtcagtgtgccgacagcgcccctggtccattcggtccagtcctgcagggtgttgagcacatgcgcatagccttttgcggtcagcccggatgggttcgctgtgttgaacaggcttgcgccaacctgggcgcgggcgcgtgggtcgaagtggggaaacatgcggttcatgtgcgtggcaatcgatgagggaagcggcggctgcgggtggatgagccaggtgtccaagtgagcgttgtattccacgagcctgggttgttcaaacggcgcgttcgcgaccacgtgctcgaattgcgcgaatgtcgagtgaggctggtccgccgacacgatggcggttctcgcgccttgtgtggcgaatacgctatcgcctggcaggatcgcgtagtaacgcccgttgatcttgatgtagtcctgtagcgcctggctcggcgttgcctggcttcggcgccacacgcccgggcgccccggcacaggggtcatcgtctgtggcgcaaaggcctgcccccaatccacaaaacgctcggcgtcgctgcgcacagggcgctgaggcggcagggctggcctgcttggcccgggggcggggccgatggcggtgacggtttgggtgcccggcaggtcggtaccatgcaacctggaccagaagcggttctcggtggtttgcaggtacgcaaagcttagatcgagttggcttggcgcctggctcaggcggaacaccagggacatctggtgttcaaggttattgaacgcggggaaattgaaggattcaaacacccttcgagcctgttgcaggtccaggtgcggtaaaagatccatcaacgccctttccggcacggtagggggtgagccaccgaacagcccgatgagtggcgagcggatctcccaggctccttgaaccgtgcggtagagcggctcgcccgggtacgcactgggtgcgcgccgtgggtccttgagtcgccagacctgacgatcgtgatccctgcggatcgaataccagcggccactctcctgcaggaaatgccgaggcgcctcgaaggccccgggcgtcgccgtatcctgtacgtagatttgctggtcttcccatcctgccagcggcttgacgcccgtgggcttgctgcgcaacgccagcttcgggttaagtttggggccggttgcgatacctctactcgccgaacgcgcgccgccgatggcgccgtcgatcaccgcgcccaccatttcacccagggcccgcacaatgtattgggcggcggcggtgcggtcgccgagttgggcggcttccacggcattgatgatggacaggatgcttctggacaggccgatcggcagcatgaccttgaccggcaggaacaacgtggcgaagtccagtgccgcggtgacgagggtggcggcgctttcgaggttggcttcctgggtgctggtcgattgcgcattggcatcgttgatcacggcagacgcttcggcctggtaagcctcttccaggaagtgatcggcgatacggctcaaggcgatgaccgtttcattcgccccacctttgagcaggttgtggatgcgcgggcgggcactgagttgcacgcgggcagtcaggtagtcacgccaggcgctgtggttgatgaagtcgcggtgcatggccgacgcgtcggcgtattcgtggaacagccgaccgttggcggtgccgggggtatacaccaccagggaggcgacgctgtgggacgcggttgaaaacaccagcaccccgcgcacgcgttcaccgcgcagtttcaggctgctgacgatgatgcggtgctcttcgacggtggggcgtttatcgtcatccgtggggccggcgagggcactcattacccagttgtacccgcggtcgagccggtccggcaggaagtcgccggcgattttggcctcgatggcgtccacccgcagttgcaaggccatgagttgggcgtagcgatcctggtcggcgtgcgcctcgctggagctgaccaggcgcgacttgaggaattgctcgtagctgtcaccgatattgaccttgcgtaccagctccttgacttgcgccaccgtcagcgcggtatagggcgcctggtctttatcggtcagccaggcgaagtttgtgaagttgagatccagccactcaacgttttccagcgccaatgcggtcagggtcagcgtgcgtgtggtgtagaccggcgtgcctgtcgccggcggttgcggcttgccgccgaccacatagctgccggtggggcgggcggcgtaggttttggtgtggatgaggagggtgtccgggtcggtcaccacgccgtagtcggcctccagctgcctgcgcaactgctcattgctgtaggacagtacggcggcggggtcgctgaattgggacagggagggcagcccctcgggcatggacagccgctgcagctcatcggcgtattcctgtactgcgcttgtccagcgttgttgatcgccggggctcgcttgcttgagaaactgctggagctggcgccgcagtttcttctggtggcgggcgaccaggacgccactggcatcataggcacggctcagatcggtgacccggtcgaggcttgccggcaattgtcgtggggccaggccgtggggctgacgctggtagtgcgcaatcatccaggtgaagtctgcctgtgcccgctcatgcaaggcgtgcaggctatcgctgaacaccgactccagtcgttcgaggtagcgaaactggtcgccttgggggtgttgctggtgaaacgccaggccgctggcacgatcgttgtggctcatcagggccaggatgtcgccgaattcgatggcgctgttgagtcggcgatgcaattcacggtcaaggccggccagtgaatcgaaggcttcgaagccgctggtcgggaggtacaacagcacattgccgacgttggcctggggggcgatgtcacgcacttggagtggtttctcctcaccttcgaagcgcacctgggcgtcgtccgggtccctggccgtcagcacgaatgccccgtacagcgggatatcccgcgacagtttgtctttgaccgccacgcccaaggcgcagggtcggtagccgttcaaggcgcgtcgggaggccgcatccgggtagcgcatgacacgcaggagcagcagctcgctcgacacatcgagcaggctgtcgatcttcagcagttcggcttcggctctcatcagatccaggcgcttctcggccagccactgtttgctggtgcgggtatcgttggtgtcgatgggcgtcccccagaactgttcgacctgggtgttgaagcgcgccaccagggtgcttgccagcgtatcgagaaaaccgtcgaaggcctgcggggtgagtgccagtgccgagccgtagtcccgaccgtcgcaggtcaggtgaaagcgggtagcgtgcttggcgtagtgggcggagtgctgcgtgaccaatcgttccactgcggcctccatgagtgtcggcagcaacggattcaacgcttgagccggctcggtaggggacgcgtctgccgggttgatcttgaggtaggtcctggtcaggtcgaggggcgtggtcagcgtgttgaacgcctggttgaacgcatcctgcacacagctgaaaaacgtgggttgcccctgcaacagctgcctgatttcgctgttcagggtctggatcctctggaccaggcggctttcgcggcggttgtcgcgcgcgttcaacgtggtgatcatcggggtcgatagagcgttgccgtatcgcatgtcatttacctgcaaaataaggtgaatggccatggtgctgcgggtgcgggctgcgtgtgcgctatcccgttaatacgttgaagggtggcgtgtgcggtgtttgtgattgcggctgaatgtttgcgtgccgcagcggtccgaacctgggtacgcatcattcattgaggaacacccatgacatcaaaatccctgttcgcctccctgctggtcgccgcgagcctgtccaccgccagctttatcgtgcacgccggtgatacgccccaggagacggtaaagccttccagcatcaacacccgtgacctgaaggaaggtgaccgcgccccggatatcctgatgcgcaaggagtcggccgtcagcgactggaaaaagcgcggtctcaaacagcctgaagaagacagccaatgggcacgggtgggcgaccgtttcgtgctgctcaagaccactaacggcaccattctcgagatcacccccgtcaagaaatgaccttgcatttaggccctgctcctgagttaaggtagccggctataaaggccgcgttaccttcaaggaaagagagcaggatgcttgccacaataagaaactatccccgcaccgttaacctgttgctgtcctcgacgttgctgctcacgctggccaaggccatcacctttccgtacctggtgatttacctcacccgccacttcgccctcgacattacccaggtcggcctggtgatcggcagttcgttgatcgttggctcgctgctcagcgtgtatggcgggtttctggttgatcgtatccacagctaccggctgttgctggcccttaccttgctgttcctgctgggctttgtcggcatggtgctcgcggggagtatctggaccttctacacctgcctgatcctgatcaacctggctcatgccgtgatcgatatcgcggccaaagccggctttgccagcctgttgcccgaggacgcgcgcagcgaagtgttttccatcaagtacaccctgaccaatatcggttatgccgtcggcccggcgtttggcgcggtggtggccaaggtggaaatcagcttgccatttgtgctgtcggcgctgttggggctggggtttttcctgctgtattggcgttggggtgatcgtacgctggcgaccgtcgacaccacgcaaaagccagtgccgttcctcgccgttggccgggtgctgttgaaggatcgtcgccttgtctgcttcaccctcggcggtgtactgagtgccgtggtattcggtcagttcaccgcgtggctgtcgcaatacctggtgaccaccaccacggccgactacacctacaccgtggtcagcgccgtgctggtcaccaacgcggtgttggtgatcgccttgcagtacgtgatcggccggcgcatttcgcaccgctacctgggccaatggttgatcgccggcctgggcatgttcatgttggggctcatcggtttcgcgctgtccaccagcgtgctgtggtgggtgctggcaatggcggtgttcaccgtgggggagatcattgtgttcccggccgaatacatgtttatcgaccggatcgccccggaccacttgcgcggcatgtattacggggcgcagaacctgtccaacctgggcgcggcgctgggcccggtgctgtgcgggctggtgctggccagcctgccggcccattacatgttctggatgctgggcgcgtttatcgttgggggcggggtgttctacttcattggggcgtcgttgaaggcaagtcatccagcgtgagctggcccatggtgttgctttgcaattcgtagcgcagctcatccaccatcttttccacttcttgcggggtctgcaggcggttggtgctgatcccggtgacgaccaggtcgacccggccggtttcggcgtcgtagaccttgagggtcagggacgcatcccggcacagggtgaactcgcaggtcagcggcgacagaccttcttcgatgcagtttcgcagttgggcgagggtaaacatgcaggttccttcaggcatcaggttcgataccgagaaggttattgattagccctcgctgcaataaggcgaattcgcactaggtgtactagtgcatttgcactgtcatggcttgtttttgacccgcaattccccggcaaacagcccgcgttcacgggcccagacgatcgccgcgctgcggctgtgcacccccagtttggaatacaccgtggccacatggttacgcacggtgttgggcgccagtttcaggcgcgaggcgatctccttgtcggccagcccctcgcagatcaggcccagcacatcgcgctcgcgggcggtgaggtcggtgaaggccacgttcgactggctggcgctgttgacgctcttggcgttggccagtttttcgatgagggtctggctgaaccacgaggcgtcctgcatcacttcctcgatggccgccaccagttccagctccgagcgtttgcgttcggtgatgttcatcatcaccagcaggtagcagggcacgtcctggatgatgaccgtgtcggcggagaccacgcagtcgatcacctcgttgcctttcttgcgtaccttgaggtcctggccgtcgaggttgccggctttttccaggcgggcgaacagctgcgcgccagcctgagggctgtcgataaagtcgatgtcctcgatcgacttgccgatcaactcttcactggtataaccggtgatgctcatgaaggcttcgttgacgtccaccacctggtggttgctggcgttgcacaccagggtcggcaccggggtcaggcggaaggatttggcgaaacgttcctcactctggcgcagggcgatttccgctttgcgccgtggctccaggtccatgaaggaaaacagcatgcagtcctcttcgttcatgtccaatggctggccggcgacgatcaccagcttgctgccgccttcgggcagccgcagttcggcctgcatctgcgggacggtcgcgccttcgcccaggcgctggatggccaggtccttgcgttcggcctgttccagcacatccagttcatacacggatttgccgatgatctggtcgcggttgtagccggtcatctccaggaaaccctggttgaccttgatataacgcaagtcgctcaggcgacagatcacagccggcgccgggttggcgttgaaggttttttcgaagcgctgttcggcgctggcccactcggtggcgtcgctgaggatcagtaccagcaattccgcttcaccgcgggagtcagtgatcaccaggctgcgcaagcggtgcacccaggtcttttcctcatcggcaatgggggtgacttccaccaccacatcgctgaactcatcgcccgcggcggccctggccagcgggtagttgtccgcctgcaccgggtggttgttgcgatagcgcaggacaaagcgctcggcatattgctgcccgttggcccccagccccatcacgtcatgcacgccgtgcatggtcagtgcggcctcattggcccacaggatggtttgatcgacctcggccaggatcacgccgtcggatagcccggagatgatctgctgcaattggcggcggttggtttccttggcaagcacatcctgggtcatgggttctcctgggggtcggcatatgggagtacgacacctggggctcaggatagtgcggatgcattactggggcactggcattgaaccggctgggatgagccaccactcggcatcccgcgcagggggcgcgtagaatgccggccttttacgcatatctcgcaaaggtgccccttgagcgcaggcaaagccgtcggactgttgttactcacctccctgttggcggcgtgcggcacctcgccgccacgcacgccgaatgacctgtgcggcatcttccgcgaaaaggacgactggtacgacgccgccaaagtcacgcaaaaacgctggggcgtgccgatccaggtgccgttcgccatcatgtatcaggagtccggcttccaccaggacgccctggccccgcgcaaatacctgctgtggatcatcccctggggccgcgtctccaccgccgccggctacgcccaggccaaggacgaagtgtggaacgactaccgcaagagcaccggccgcagcggcgccagtcgccaggacttcgacgatgccatcgactttgtcggctggtacatggacaagacctacaccgtcaacggcgtgtacaaatacgacgcctacggccagtacctgaactaccacgaaggctggggcggctatcgtcagcgcacctacgccgccaaggcctggctgccgccggtggccagcaaggtacaggcgcggtcgcagctgtatgcggcgcaatatgcgcggtgcaaggatgatttggggcgggggttttggagtcggttctggcggtggctataaggaccacagtggtagtgttgggtgtgtctccttctctcagcgtgggagtgccgggtgctgggtgtagccaagcatctgatcatagatatcagcgcgccgatccctttgcaggtcattgagattgttccagatcggtgcgctgcgcgcgctgctgaggtcgatatcggcaaacagaatctcctggcggttcgccgacgccaccttgccgatgggccaaccattggtcccggcaatcaatgagcacccgagataacgggcatcacgctcttcaccaattcgactggctgctgcgataaacacgttattgacgtgcgctgcggtcatcgtcaggtaagacgccatgcacttgccggcctcatcaaataacgggggaggggtccatacccagttgttcaggctacaaatgatatcggcgccttgctggctgagaatgcgcggtacctcgggaaaccagatgtcccagcagatcagcatgccgatacgtccaatgggagtatcaaagacagggaaacctgtgttcccaggggtgaaccatagtttttccaagttccagaggtgcgctttgcggtacttgccgataaagccgtccgggcctatcaggacgctggtgttgaacaattgcatgccgtctagttcgctaacgcccgcagccagatacacacgatgccgggaagcaaattcgatccatacctgcacgcttcttccgttcggaacaatttcggcatggtcaaaggcatcttggcgattggcgaagaagtaaccgcagtttgaaagttctggaagcacgatcagtgtggcgccgccgttggccgcttcagttgcgagcgcaaggctgtgctgcaggttagcggtgcggtgctgcgttcctacctggggatcaaactgcacgacagaaacgcggacagggctgatagctgggttcattgcaggggactcttatgggggactgctctacataagaggtgatagggcggcaaggtgtaaatcaggtgcttccgtttaggttgtcagttggcgcctgccaatctgaagcgcttagttacggcaagaagcaaggcttcttgccgtaactcattcagctcggctgcatacactccagcgaccgatccaccatcacactggccatgtccaccagatgcatgaccgacagcaccaacgtgcgtgaagtcccttccagttgatccccggccgtttgcgccgcaacggcggcacaacgcaacacgctactggcgtgggccagggcgtcttcgaagctgaggtctggggtggtggtgaagaattgcagttctgaagcgggtggcgcggggacaggtttgtccatgggttcaactcctaatctaagttggaatgtcaccaccatcgctaccaaacgactttaagggtggtgaccgtacgcagattggtagaccggtgattaggacccggtgcacccgaaggtgccctgcgcacggccaccataacgcagggccgaaaaaaagcgccttgcataagggggcgcttagcgcctaatcactcgtggtctaccaaaccccgagtcactgaattggcagtgaccgacgaagactagccacgtgatttgagcggcgcaagcggttgggattctctcggaaacgtcctgcgagttaaagggaaatgtcactgatttgaggtgtttcatctctccaatattccttgtggcgccataagatcaaggcacaaaaactgacattagttctctggcgcaaaggtttcgcacatcgtcatcatcacggcacgcaagcttgcttgaggggcggcgggcttttttcattggtgtgtcatgtgtgtacaaaaaacgcattgccatttagcggtgtgtaatatacacacctaagggtgggcgatgagaagtcgagaggtgattgacctgttggttgcagatggttgggttgaggtggcggtgaaggggagtcatcaccagttcaaacaccctgtgaagcgggggagagtaaccgtccctcatcccaaggcggagattgccaagggcactctacacagtattttcaagtcagcagggctcaagcaatgactctgctggagcgttggacgagcgccgaagggctcgtccagaggaggatcaatgaaattcccagtggtagtgcataaagacgctgactcggattacagcgtgaccgttcctgatgtgccggggtgtttctcggcgggtggatctttctccgaagcattggataatgttcgtgaagcattggctttgcaccttgaaggcctggttgccgatcaagaacagcttcctcaggcgcaggaggttgatgctcatataggtaatccggatttcgcaggtggtgtctgggcgatcattgactttgatctaacgccctatctgggcaagtcagtgcggtttaatgcctctttgccggaacatctgttgcaacgcattgatgagcgtgtgcagaaggaccatcgctatgcatcgcggtcagggttcctggcgactgctgcattgcgcgagctttcagcgtaaaccaactcaagcaaacactatctatccaacggattccccatgagccccgaagaactccaaatcaccgacatccgccccggcaccggcaaagccgttgtcaagggcgcgctgatcaccacccaatacacaggcaccctggaggacggcacggtgttcgattcgtcctgggagcgcggcaagccgttccagtgtgtgatcggcaccggacgggtgatcaagggctgggacttgggcttgatgggcatgcaggtcggcggtgtgcggaccttgtacgtgccggcgcatctagcctatggcgagcggtcgatgggcgcgcatatcaagcccaacagtaacctgcgttttgagattgagttgctggaagtactgacgcgggatgattgagacctccaagacaaacgcttcctgaaccctccctgaagaatcctcttattcaccatacggaaactttcctacggtttactctcccatcatcggggcgtaagcttcgcgcgttttcatcaatagcggagaccctcagtgggtacttgttcgagtgacagtagtcggccggtttcggtaaccggcacaggcttggcaaggtaacgcgcatttttccgatgccgttgtctcgccactaaaagcgagaagcggcatcccggcagcggccagtcctggctcctgcccgaatccctctcatcgacgctgaccagcgcccggcttacctcgggatgctacggacgcgcctgccctttgcggcaggcgggccagggtggctgtgcctgtaaaaagggtgcggcgcacacggcggtacctgcacgacggttttttcctcgcgcaggagtaacaccatgaacctcactctgctcaaagagttcttcgccggcttcctgcggacccggcacatcgcccggcatttccgccgcctggcgatgctcgaaaccgtgaccgacgccagcgtcagccgcgaagtgccgccgaccctggcgcaaaccctggtggtctcggccaacagcagtgccgtgcaattgctcggcaccctgggcagccacgccgaggggttgaacactcaggaggccgacgccctgcgcgtgcaatacggcctcaacgaagtcgagcatgagcagccgctgccttggtgggtgcacctgtggcactgctacaaaaacccgttcaacctgctgctgaccctgctggcggtgatctcctggctgaccgaagacatgaaggccgccaccgtgattttctccatggtggtgctgtcgacgctgctgcgcttctggcaggaagccaagtccaacaaggctgccgatgcgctcaaggcgatggtgagcaacaccgccacggtgctgcgccgtgatgaagccaagcgcattgaactgccgatcaagcaattggtgccgggcgacctgattgtgctgtccgccggtgacatgatccccgccgattgccgtgtgctcagtgccaaggacctgttcgtcagccaggcggcgatgaccggcgaatcgatgccggtggaaaagtttgcccaccagcacgacgcccacacccgcaacccgctggacctggaaaacatcctgttcatgggcaccaacgtggtgtccggcgcggcgacggcagtgatcctgaccactggcaacagcacctatttcggcgcgctggcccagcgtgtgaccgccaccgaccgtgcaaccacttcgttccagcacggcgtcaacaaggtcagctggttgctcatccgcttcatgttcgtgatggcgccgctggtactgttcatcaacggcttcaccaagggtgactggaccgaagcgctgctgttcgcgctgtcgattgccgtgggcctgaccccggaaatgctgccgatgatcgtgacctccaccctggccaaaggcgcggtgttcctgtcgcgaaaaaaagtcatcgtcaagcgcctggacgcgatccagaacttcggcgccatggacgtgctgtgcaccgacaagaccggcaccctgacccaggacaagatcttcctggcacgccacgtggatgtgtggggcgaagagtccgatgacgtgctggaaatggcctacctcaacagctactaccagaccggcctgaaaaacctgctggatgtggcggtgctggagcacgtggaggtgcatcgcgagctgaaagtcggcactgcattccagaaaattgatgagatcccgttcgacttcaaccgtcgccgcatgtcggtggtggtcgccgaacagggccaaccgcacctgctgatctgcaagggcgccgtggaagaaattctctcggtgtgcaacaacgtgcgccatggcgagaccaacgaggcgctgaccgaggaactgctgacacgcatccggcaggtgaccgctgcgttcaacgaagaaggcctgcgcgtagtcgccgtggccgcacagccgatggcaccggggcgcgacacctacagcctggcggatgaaaagaacctcaccctgatcggctacgttgccttcctcgacccaccgaaggaaagcaccgcgcccgcgctcaaggcgctcaaggcccacggcgttgccgtgaaggtgctgacgggtgacaacgaattggtcaccgccaagatctgccgcgaagtgggcctggagcaacaaggcctgctgatgggcaacgacatcgaggacatgactgacgccgaactggccaaggccgtggaaaccaccaatgtgttcgccaagctgacgccaagccacaaggagcgcatcgtgcgcctgctcaaggccaacgggcatgtggtgggcttcatgggtgatggaatcaacgatgcgccggcactgcgtaccgccgatatcggtatttccgtggacagtgcggtggacatcgccaaggaagcggccgatatcattttgttggaaaagagcctgatgatcctggaggagggcgtgctggaaggccggcgcaccttcgccaacatgctcaagtacatcaagatgaccgccagttccaacttcggcaatgtgttttcggtgctggtggccagtgcgttcatcccgttcctgccgatgctgccgatgcacctgctggtgcagaacctgctgtatgacatttcgcagattgcgatcccgttcgataacgtcgatgacgagatgctgagcaaaccacaacgctggcaaccgggagatgtcggccgtttcatgctgtttttcgggccgatcagctcgatctttgacatcaccacgttcgcactcatgtggtatgtcttcgatgccaacacccccgaccaccagaccctgttccagtccggctggttcgtggtggggctgctgacccagacgctgatcgtgcacatgatccgcaccccgaagatcccgttcctgcaaagccgtgcggcgatgccgttgatggtgatgacgggcgtgatcatggcggtggggattttcctgccgatggggccactggcgcactacttcaaactgcaggcgctgccgtcgctgtatttcgtgttcctgccggtgatcctgctggcgtacatggcgctgactcaggcggtgaaggggtactacatccgtaagtttggctggcaatgaacagggaagatttcctatgcaagcaatcaacaacatcaacctcgaatccctggtcgacaccctggtcagcctcaccgcagccttcatcctgggtggcctgatcggttttgagcgtcagtaccgccagcgcacggcaggcctacgcactaacgtgctggtggcggtgggcgcggcgattttcgtcgacatggccagccgcctggggggcgcggaaggcgcggtgcgggtagtggcctatgtggtgtcgggcatcggctttctcggcgccggcgtgatcatgcgcgaagaaggcaatgtgcgcgggctcaacacggctgccaccctctgggcatcggcggcggtgggtgcttgcgcgggcgccgacctggtcctcgaagcgctgctgggcacgctgttcatactggcggccaacaccttgctgcggccgatcgtcaataacatcaaccgtcagccactggacgtggtgtcggcggaagttaccaacatcctgtatgtgattgcccggcgtactcagcagaaggccgtactggccttgctggaagccgagcttgcacgctgtaactatcccgccagcgacgttgacgtgcggccttttggcacggaagaagtggaaatcgaagccaccctggccgtgacctcggtagacggtgatgagctggacgccctggtggcgcgaatttcgatgtcgaccctggtggtgcaggcgttctggagccccagtaccaccgagtagtcccccgctgtcaggcattgccctgcgtaaagctggctatgctgtgacaaggaaaagtcctacaagcattagagactatcccttcatttgagcggacacgccgttgttaaggttgcgcgcttgcgtctgcccaggaagcagtccgcagctctacgtgtttagcgtgttctatcaaaaggaggggtctgtactgcctgaagtgtcatgcagagtaatcagtaccgtttgtcggaactgttacttttcacaggtagataggtcccgtgtgatatgtaagcgtactgatccctcggggagtcttatgagcagcaaagctttgattgtggacgatcacccttttatccgcgccaccgtgaagtacctgttgaagcaggagggcttcgataccatctttgaagcgggcaacggcgccgacgccatgcagattgctcgggaggagcacccggatctggttatcctcgatctggcaatgccaaaacttggcgggctggaggtgatcagccggataaaggcgctgggactgccctgcaagatcctggtactgacctcgtatctggcggtgtttttctccacgcgctgcatgcgcgctggggccatgggtttcgttgccaagaccggtgagctcgatgaactgcaaaaggcaatcagggcaatccgctctggttacagttgcttccccagcctgcccaccagttcagtgcgccgcgacgatttgcagacctccgaacaggagttggtggaggcgctgtccgaccgcgaattgacggtactgcaaaaactggcgctgggcctgagcaacaaggaaatcgccgaggatatgctgttgagccacaagaccatcagcacctataagacccgcctcaaagagaagttgcgcatgtcgtcggtggtgcacctgtccaagtttgcccagcgcaatcatctgatctgatctgaaatgaccacctcccggctggtgagattcacggccatcctgctgatggggctgttgccctgtgcagcgatggccctggatgagccacatgccctgcgactgctcggccattccaccctcgaacacccaacagtagcgctggatgacagcgactggcggtggttgcgcgatcgccgcagtttggtgatgggggtgtcggcacccgactacgcaccgttcgacctgagcaacgacaacgattttgaaggcatcacggctgactacacgtggctgatcagcctgatcttgaatgtacctatcgaggttcggcgctacgacacccgtgatgaagtgatcgaggcgctcaagctgggcgaggtggatctggtagggtcagccaatggttatgaggcggccgacaaggcgttggtactgtcgcgttcctacgccaatgatcaaccggtgctggtgacccgcacgggtgaaagccattccttgagcgtcgacctggccggcaagcgcgtggcgatgctctatcactatatgcaacccgacgctgtgcaggccttttaccccaaggcgcaactgttgttgtacggttcgacccatcaggccatcggtgccgtggccttcggccaggcggacgtctacttgggcgatgccatcagcgctcgctatctgatcaacaagaaccaccttaataacgtgcgcatggcagacttttccgccctcgaggtcaacccgttcgggttcgcgtttacggccgaaaaccagcgcctgttgacgatcgtcaatgccgcgctggctgctatcccggccagccagcagatggaaatcctgcgtcgttggagtgccggcggcagtgggttcctggaggctgaccgattgcgcttgagtgacagcgagcagcgttggctggagaagcatccccgggtgagagtggcagtactggataagttcgtgccgctgtcatttttcaatgaacaagggcagttcgtggggttgagtgacgaggtattgtcgcggatcagcttacgcacgggcttgaagttcgaagtggtgcagggcagttcgctgcctaggcaagtcgacgaggtcagcgccggccagatggacatgttggcggtgatcacgcccagtgtcgagcgttccgaaaaggtgcgctttacccgaccctacctgtccaatccctatgtgctggtggtgcgctccggcgacgagcgtctgctgaccctggaggacatgccaggcaaacgcctggcgttcattggtggcaacagcctcgctgcgcagatcgcccgggactatccagggatcgagtttgtcgacgtcgagaacccggagcaggccatggaatgggtggccaagggcagtgccgacgcgacagtcatttcgttgatcagcgcacgctacatgatcacgcgcaactatcgcgatcggctgcgtatcaccagcactgtgggtacggaaccggcgcggattgccttcggcgtcaaccgcagccagttggagttgtattcgatccttgagaaggcgttgttgagtattacgcctgaagaaatggacgaactgaccaaccattggcgcagtgaaatcattattgaagacagctactgggtcagtcatcgcaacgtgattatccaagggtttggcctggccgcgctgttgttgctggtcaccctgggctgggtgttttacctgcgcaacctgattcacaagcgtgcccaggccgagcgcgccctgagcgaccagatgcgctttatgagcgtgctgatcgacggcacgcctcacccgatttatgtgcgcgatcgccaggggcgtttgatggcgtgcaacaacgcgtacctcgacgtgttcggcttcaagttggaggacgtgatcggcaagactgttgtggagaccgatacgggtaacccgccccaggcccagtcgttccatgccgactatctggacttgatggagcgcggtgagccgcagattcacgaccgggtgctgaaggtgcccggtggcggtgtgctgacgatttaccagtggatgctgccgtaccgtgatagcaacggcaacgtggtaggcatgattgccggctgggtggacgtgagtgagcgccagcgcctgttgggccagttgcaggaggccaaggacgatgcggatgccgccaaccgtgccaagactacgttcctggcgacgatgagtcatgagatccgaacgccgatgaacgcggtgatcggcatgattgaactggcgcagaaaaacgccgaacaggggcatgttgatcgagatgcgctggaagtggcatcgatggcttcgcgcagtttgctggagctgatcggcgatatcctggacattgcgcgaatcgaaaccggccacctgtccctgaccctggagccggccaacctgcacgagctgttggcctctgtggcgcgggtgttcgaagggctggcgcgggataaagggctgtcgctgcacgtagagctcgacccgatcatcgatcgactggtactgatcgatccattgcgcttcaagcaagtggtgtcgaacctgttaggcaatgcgatcaaatttactcactccggccagatacgcctgggtgcccaagccgcatcggtgttggccggtgaacatttgaacctgcggctttgcgtggaagatacggggattggcatcagcgccgaagatcagcagcgtttgttcaacccgttcatccagggcagcaataacgagcagtcggcgcgcagtggttccggcctggggttggtgatcagccgtaacctgtgcgagatgatgggcggccaactgcacctgagcagcgtgctgggcaaggggacgcgggtggatgtgacgctggcactggcgttgaccacggcagcagcggtttcctcatctgtcccctgtgcgcctatcgcgcaggcattgaaacttctggtggtcgatgactatccggccaaccgcttgcttctggctcgacagttgaccttcctggggcatcagatcgttacggccgaagatggcgccgaaggctttgcgttgtggcaggccgggcattttgacggggtgatcaccgacagcaatatgcccgtgatggacggctacacgttggcgcgtgatattcgtgcgcaagaacgtcagcgcggcctggtgccctgccttctgctggggttcaccgccaacgcccagccgaaggaggttgagcgctgccggctggccggcatggacggttgcctgttcaagcccactgggcttgacgatctgcgtgcggccttggcgtcgcgcacggccagcgctgcaagggatgaagccaaagcgcaatttgatttgagctcgctggtgatgctgaccggcgatgacactgccgtgctcaacgagttgctggcacccttgctcacgagtcttgcagaggacctccgagtgctgtcgaccctgcgggacggggccgatttcggcaagctgcatgacctggcccatcgtgtcaaaggcggcgcgcgcatggtcaaggcccaggcgctgatcgcctgctgcgacgctttggaggatgtgtgcgaaaggcgcgatcgcgatgcagtggctgctgcggttgaggcgttggacgcggctatcactggcttgcatcacagcctaggtcagtactgcaagcagccttgaccgaggcaggtatccgttcggcgaatttgggagaactcctacatggaacgggaacaagcctgattttgtcgtcggcatatgtctggagaatgggcctcgctcactgacgagcactgcctgcccaggggttcgccatgccaaacaaagcactgaccatcctgattgccgatgagcaacacctgcaacgcctgtacatcgaaaaaatgctcaaccagttgggttatcaccggatcgtaccggtgcagaccttcgaagaggtccaactgctcaccgcgattccggcacagcctttcgatgtgctgatcatcaacgcggggctggcgatccacacctgcggtcctcaaccccaggtgcatcatgtgctggtctatgaccatctggatctgggcctgtctgccgacgcaacgccggcagtgctggtgcgcctgcccggcgtgccggacaacgtcaacctcgaacacttcatggacatcatcgacccgcctgcggccgccacgggcctgcgcgtactgccgtggctgcgggagttatcccgcacgcctgtggctggggtttagtcccactggggggcgatacccttggggctggtgaggcgatggccgcgttccagcccggccatctgcgccatgtccgcagggctcaaggtcagttgctgggccttgaggttgctttccaggttggcgcgtttggtcgatgacgggatgactgcgtaacccagttgcatcgcccaggccagtgtcacttgcgccggggtcgcctgatggcgctcggcgatttgctggatcaccgggtccttgagcacttcgccgtaggccagggtcatgtaggacgtgatctggataccgttggcggtggcaaaatccacgaccttgcggttttgcaggtaggggtgcaactcgatctggttggtggcgatattctccgcacctaccgccgcaatcgcttgtttcatcaggtcgacggtgaagttggaaatgccgatccggcgggtcaggcccaggcgcttggcctccagcaactggcccatgaattcggcgacaggcacctggtcctccggcgagggccagtggatcagggtgaggtccaggtaatcggttttcagtttgcgcaggctctcgcgcaggctcggaatcaactggccttcggcgaagttggcgatccagatcttgctggtgatgaacagctcatcgcgcggtatgccgctgtcggcaatggcctggccgacatcggcttcgttctcatagatttgcgcagtgtcgatgacgcggtagcccagctcgaggccagtgctgacggaatcgatcaccacctggccttgcagacggaaggtgccgaggccaaaggccggaacgttttgcgtagcgatagacatcagtgactcctgaagagggcttgaacaatggagtcgagtatccgcttgtcgttccttcggaaaaaccgtcgaatgcgaaaaggactctttaccgcagatcacgaatctactggggctggatgggtgtcgccgggttatcgcgactgatgtagagtcgtgctgccaactcaacccaaggaaatcgccgcatgacccaggaatcccgtttctcccggatggacccggaagtgcgcaaggccaatctggtccaggccacgctcacctgtctcaagcgtgatggtttccagggcgcgtcgattcgcaagatcagtgccgaggccggggtgtcggtggggctgatcagccatcactattcgggcaaggacgaactggtggccgaggcctaccgcaccatcaccgaccaggtcatgagcctgttgcgcgcgaccatggccaaggcgccgccgaaccctcgggagcgcctgtcggcgttgttccggggctcgttttctgccgaattgctcgacccgcacctgctggacgcgtggctggtgttctggggagcggtaaagaccgcaccggcgatcaacctggcccacgaacactcctatggcgagtaccgcgccatcatgcgctcggccctgaccgacatggcctgggaggagggctggaagcacttcgacgccgacctcgccgccatcggcctgagcgcattgctcgatgggttgtggctggagtcggggctcaaccccggcacgtttacgcccgaacagggcatccaaatctgcgaagcctgggtggatggcctgcaggctggcggtcgccagcgttatcagctcaaaccctgagcctgctccagccgcctgagcgcaaggttcaggcaggcggttttcccttctgaaaaaatttgcagtttgctgattgccttcttactgaacacttgtttagtatcgcctcatgtcgcacccctcaggccaaataaaacaattcgaggaagccatgaccgccgattcgcccgtgctcactcatgtagcagctggtgttgcctggatcaccctcaaccgtggcccgcagcgcaatgccctggacatccccaccctcaagcacctgcacgccttgctcgatgcgttcaacactgacgccgctgtacgcgtggtggtattgaccggtaatggacgaagcttctgcgccggtgccgacctggccgagtgggcggatgccgaagctcgcggcgccctcgaaacctacggctggaccgaaaccgcccatgcgctgatgacgcgcctgcacaccctcgataaacccacgattgccgcgatcaacggcaccgccgtcggcgcgggcatggacctgaccttatgctgcgacctgcgcatagcggcccaatcggcgcgcttcaaggccggttacaccagcatggcctactcgccggacgcgggcgccagttggcacttgccgcgcctgattggcagcgaacaggccaagcgcctgctgttcctcgacgagctgtggagtgccgagcgcgccttggcaactggcctggtcggcgaagtcgttgccgatgatcagctcaatgcccacaccaccgaactcgccgcacgcctggccaacggcccgacgttcgccttcgcccagaccaagacgctgatccgtgaaggcgccgggcgcagcctgcccgaacagttgcaggccgaacgggcggccggcctgttgtgcgggcgcagtgccgatggcgccgaggccttgcgcgcgtccatggaaaaacgcctgccgactttttgcggccaataaccccacttcctccgagcaggtagcgccatgcatttccaactcagccaagagcaagacatgttggtggacgcggtacgcagttttgttgccaaggaattgttgccccatgaggcggtggtggaccgtgccgatgaggtctcgcccgagctggctgcgcagatccgtgacaaggccatcgctgccggcttctatgcgttcaacatgccggaggaggtgggtggcggtggcctggactacctgtcccaggccctgatcgagcgggagttgtccaaggtctcgtgggcgctgcatgtgtttgtcgcgcggccgtccaagattcttatggcgtgcacgggagcacagattggcgactacctgctgccgtgtgtgcagggcaagaaaatcgactgtttcgcgctgaccgaacccggcgcgggttccgacgccaatgccatcaagacccgcgctgtgcgccggggtgatgacttcttgatcaacggcagcaagcacttcatcagccacgccgggcacgctgatttcgccatcgtgtttgcggtcaccgatacctacgaacacaacggccggcagcgcaacgccgtgacgtcgttcctggtggatcgtggcacgcccggcatgaccatccgtcgcggccccaagtgcgtgagcaaccggggttatcacacctatgaaatgttcttcgacgactgccgcgtccccgcttccaaggtactgggcgaagtgggcaagggctgggacgtggccaacgcctggctcaccgccggccgtgtgatggtggccgccaactgcgtcggccaggcccaacgtgcgttggatgtgtcgctgcaatgggcggcggaccgcaagcagttcggccagcccatcggcacctatcaaggcgtgagcttcaagctggcggacatggccacacagatccgcgcagcagaactgctgaccctgcacaccgcctggaagatggaccagggcagcatgaccgatggcgaggccgggatggccaagctgtttgccagtgaaacgctgggcaaggtcgccgacgaggcggtgcagattttcggcggcatgggcttgatggatgaggggccggttgagcgcatctggcgtaacgcgcggatcgagcggatctgggaaggcacctcggaaatccagcgccatatcatcgcccgtgaactgttgcggccactgttgcgttgatggcgcggagaacgcttatgtcccaggctaatcgcgacaacctcaagcgcctgttggcgccccggcatctggcttttgtcggcggccgcagcatggcccgtgtgctcaagcgttgcgccgagggtggttttaccgggccgatgtggctggtcaacccgcagcatgacagcctcgatggcatcccctgcgtacgtcgcgtggcggatttaccctgcgggccggacgcggtgttcatcgccaccaaccgcgaacttacactgacttgcgtcgccgaactcggggctatcggtaccggcggcgccatttgctacgcctcagggtttgccgagaccggggccgatggcgccgttctgcaacagcagttactagacgcagcgggtgagatggccttgcttggccccaactgctacggcctgctggactacctgcacaacgctgcgctgtggccggtggcccatggcggcaagacggtggagaagggcgtggcagtgctgacccagagcggcaacttcgcctacaacctgtcgatgagcgaccgttcactgccggtggcctacatggcatcagtgggtaaccaggcgcaattgggtattgccgaactgatggaggtgctgctcgatgaaccgcgcgtcaccgccatcggcctgcacctggaaggcttgaaaaatgtgccggggtttgcccgtgcggcccacaaggccctggaaaaaggcattccgatcatcgcgctgaaaaccggcgtgtcgcagatcggcgccgagctggccttgagtcacaccagttcgctgtccggctccgatgcgctgtacgacagcctgtttgcgcgcttgggcgtgatccgcgtgagcgggccggtgagttttgtcgaaaccctcaaagcggcggcatgcggcaaccttcctgcgggtaaccgcctgatcgcgttggcctgttccggtggcgatgcggggctgattgccgactatgccgaacgcaatcatctggccttgccccagcttgatgaaagccagcgccgtgaactggcacaggtactgcccagttacgccaacctggtcaacccgttggatttcaccacggccatctggggcaatcgcgaggccctcgacgccatgctcgacactaccctgcgcaccgatgccgatgccgccctgttggtgttggattacccggccgagtccacgggtgagcgcaaggagtgcgacctgctgctggagttgttctgcaacgcgctgggccggcatggcaagaccgggtttgtcacctcggcctttcccgaattgctgccggcccatgcccgcgagcgcctgcatgcccatggcatcgcggcgctgcaaggtgtggaagacgcgctggcggcgtgggggcggattgccggctaccagagcaatcgccgtgtgctgctggagcgcggcgaatcaatcctcgaaccgctatgcccgaaggctctgcaaggcagcggtgaggccctcgacgagtgggcttccaaacaagccttgcgcgcgttcggcctgaccacgccaatcgggatattgagtaccccggcccgggcgatcagcgatgcccaagtgcttggttatcccctggtgctcaaggcggtcagcgcgcagttgccgcataaaaccgaagccggtgcggtggtgctgaacctgaaaaatggcatggcgctgagcactgcacttgagcagatgcgcgagcacatcggcgcttatgcgccccatgtcgtgtttgatcaactgctgctggaggccatggctgcgccgccgttggcagagttgatcgtgggcatcaaacgcgaaaacgagtttggcctggcactggtcatcggtgccggcggcatcctggtggagttgctcaaggacagccgcagcctgctgttgcccaccaccgacagtgccatccgcaatgccttgctcagcctgcgcagcgccccgttgctgcaaggttttcgcggccgtgacggggcggatatgcaggcattggtcgcggccattcgggcagtggccgactacgcctgcgccaacgccgggcagttgctggagctggatgtgaacccattgttagtcagtgcccagggcgctatggcggtcgacgcattgatacgtctaggagatgagcatgcacgataacgcgatgaccggcggccaggccctggtgcggttgctggccaattatggggtggacaccgtgttcggcattcccggtgtgcatacactggagctgtatcgcggcctgcccggcagcggtatccgccatgtgctcacgcgccacgagcaaggcgccggtttcatggccgacgggtatgcgagggtcagcggcaagccgggggtgtgctttgtgatcactgggcccggtgtgaccaatgccgccaccgcgatcggccaggcgtatgccgactcgattccgctgctggtgatctccagcgtcaacagcaccgccagccttggcaagggctggggcagcctgcacgaaacccaggaccagcgggcgatcaccgcaccgatcaccgcattttcggctgtcgcactcagtgccgaggatctgcctgaactgatcgctcgcgcctacgcagtgttcgacagcgagcgaccccgcccggtgcacatctcggtgccgctggacgtgttggcggcgccgatcaagcgcgactggagcgatgaagtggtgcgccgcgccggtcgcggcgtgccgtctgcgcaagccttggatcatgcggtggccaagctcgcagcagcccagcggcccatgattatcgccgggggcggtgcactggcggcaggcgaggcgttgcagcgtttgagcacgcagttggctgcgccgtttttcaccagcgtggccggcaaaggcttgctgccgctcgatcatccgttgaatgccggtgccaccctgtgcgtcgagcccggctggcaactgatcagcgaggccgatgtggtgctggcggtgggcacggaaatggctgacaccgactattggcgcgagcgcctgcccctcaacgccgagctgctgcgggtggatatcgacccgcgtaaattcaatgatttctacccctgtgccgtggcgctgcgcggcgatgccaaccagacggtgctggcgttgctggagcgtttgccaaccgtgtcagctgacgcggaaatggcagccaagcgtgtggcggcattgctccaggccgttgagcggggacacggcccgttgcagtccacccaccaagcgattctcgagcgcatcgaagccgaactgcccgccaatgcgttcatcagcagcgacatgacccaactggcctacaccggcaactacacctaccgcagccgcgcaccgcgcagttggctgcaccccaccggctacggcaccttgggttacggcctgccggcgggcatcggtgccaagttcggcgcaccgcaacggccgggtctggtgctggttggcgacggtgggtttctctacaccgcccaggaactggccaccgccgtggaggaattggacagcccgctggtggtgctgttgtggaacaacgacgcacttggccagatccgcgatgacatgctcgacctcgacatcgaacccatcggcgtgctgccgcgcaacccggacttcgcgctgttcgcccaggcgttcggctgcacagtgaaccagccccacaacttggatgagttgcagacggacctgcgcaacgctttccaacgcaatggcgtgaccctgatcgagctgaaacaggcctgcgctgtttgaggaactcccatgaaggttttgattgttcacgcccatcccgaaccgcagtcgttcacggcggccctacgtgatcaagcggtcgccacgctgcaaggccaggggcacagcgtcaaggtgagcgatttgtacgccatgcaatggaacccggtggcgtcggcggcggatttttcgacgcgggaaaaccccgattacctggtgtatgccctggagcaacgcctgggggtgaagaaacagtcgatagcggcggatatccaggcagagttggacaagttgctgtgggccgatctgttggtgctcaactttccgattttctggttctcggcgccggccatactcaagggttggattgaccgcgtgctggtgtcgggcgtgtgttacggcggcaagcgcttttacgatcagggtgggctggccggtaagcgggcgctggtcaccgtgaccctgggcgggcgcgcgcatatgttcggcgagggcgcgattcatgggccgctggaggacatgttgcgaccgatcctgcgcggcacgctggcgtatgtgggctatgaggtactggcgccgtttgtggcgtggcatgtgccgtatatcagtgccgaggcacggcaggatttcctggtggagtatgagcggcggctgcaagggctggcggatgaacagcccttggtgtttccgaaacttgagcaatttgatgaggcgctgtacccgctgtagcagcgccctggtcggtcagcctcgtgcgcgcaaacgctcggcggcgctacgcaacaactgctcggtgccgtcccagcccaggcagccatcggtcaccgacacgccgtacttcatcgacgcgctcaacggctggcagccttcgaacaagtggctttcgagcatcatgccgatcagcgacgtgtcgccctgcaagcgctgctccagcacgtcgttgaataccgccggctgacgcagtgggtccttgccgctgttggcatggctgcaatcgaccatgatccgcggcgccaccttggacttggccaggtcgtgtttcacctgcgccacgctttgcgcatcgtagttcggcccacggtgaccgccacgcagtaccaggtgggtgtcggggttgcccggggtctggatgatcgccgggtggccctggctgtcgacgccgaagtgacggtgcgggtgggacgccgagcgcatcgcgtcgcaggcaatcgccacaccgccgtcggtgccgttcttgaaacctacgggcatgcccaggccgctggccatttcgcggtggatctgcgattcggtggtgcgcgcgccaatcgcgacccagctgagcaggtcatcgaagtagccggccgccatcggttgcagcagctcggtggcgaccggcaggcccaggcgcagcatttcgcgcatcagttcgcgggacaggttgaggccggcggccatgtcgtcgctaccgtccaggtgcgggtcgtaggccaggcctttccagccgatggtggtgcgcggtttttcgacgtaggcgcggatcaccagcagcatctggtcgctgacgtcgagtgcgagcttcctcaggttgcgggcgtattccatggccgactccgggtcgtggatcgagcacgggccgacgatcaccagcaaacgtgaatcctgaccattgaggatggcgcgcacggcgtggcgatgggcgtggacttgttcagtgaggaacgggctgagcggcagcttgagctttaaatcaagcgcgctgggcaagcgctgggtcagggcttcattggcgctggtcagggcagaaacgggcagggcggcggtggcagagttcatattcaaggcttcctgggcaagcggcgggctgttcccgcgcgcctggccctactggggtgttcgacaatgggccgtattggctgtgtgtgttggcttgccacccataggtgaccgatcggaggcggcaggctgtcccgagcggagctggctaaatcgccatgcggtggaagtgtcgtagcggtaataggtggcgtagttcatgtcgtgtgtcctttaagtgttcgtcaaaaatagtggggcctgaaaaacaaaacccccggtcggggagccgaccgggggtttggatttctctggtaggcgaccccttgagtagtgggcgccgatttcaggtatcaggcgcgccagtggctaaaccaatacccaaaataaaagctggccagtgcgctcgaacccttcacacgggtagccgataccgagcgcggggcgctggcagcagggcaaacctgaggggtggtgagttgcaacatggtgtgtctccaaatgatggggggagcttactagagggatgcaggaggattcaatcagtaatttctattgcgcggggggactgactgctatcgaccgagatatgcttgcaacaccttggatgattgcttggacgcgaccatgactgccctgacccttgctgctgctcaatctgtttccatcgcgggcgacgtgccggccaatatcgagcggcacttggcccttatgcacgcggcggccgaccatggcgtgcaagtgctggtgtttccggaactctcgttgaccggctatgaaccgtcgctggcggccgaattggcgattgttcccgaggacgcggtgctggcgccgctgcgcgaaatggcacgggaattgggcttgaccacagtggtcggcatgccgatccgcctggcaccaggggcaggtgtgctgatcgctgcgctggtgttgggggccgacggttctcttgcggtgcacaccaagcagcatctgcatcctggcgaagaactggcgtttgtcgcggggcagggtggtgcggcgctcgacactggcgatgaccgcattgcgctggcggtgtgcgcggatttctcccatggcagtcacccgcgccaggcggctgaggcgggcgccactgtctacgccgccagtgtgttgatcagcgaaggcggctatgcaacagacagcgcgttgctccggggctatgcggccgagcatggcctgttggtgttgatggccaaccatggcgggccatcgggtggctatgtgtgtgccggtcgcagcgccatttgggccaccgatggccgtttactggccgccgcgccgggcctgggtgaggcgttggtgatcgcccgccgcaagggtgctgcgtgggctggtcaagtggtagtgctgtaaatggggtttcacctgcgcgccgcgacggaccaggaattgccgttcgcccgaaccttgacctttgaggccatgagtcgctattacctgcaatacgacctggtgtggtccaacgatggctttgatgtcgcctgggcggaccgcgaaaactggctgatctgcaacgacgaggccgtgctgggttttatcagcctgagccgcgacagccgcgcactctacatccgtgagttgcatatgcttgcggcgtgtcgcaggcagggcgcgggcagttgggtattgcagcagatggcgctcaaggcccaggcgttggggttgctgcgtttgaccgtgttcaagaccaacccggcccgcaggctctatcagcgcatggggtttagcattgtcggtgaggaagactgcttctggcgcatggaacgtatttgcccatcaagctaaaccatgcgctcaatcctaataagcgcatactggttttcaggagacgacttcctgatcgttgttttggccatcagcctcagaaaggatgatcccttctttcatgcccaacaggaccgctaccttatgggcttctccacgccgtccctttttgcgccccgcgagtacttgataggtggttgccggatcaacgccatgttctcgggcgaacgcttgaactgactttccttgatgttccagccaagccttggcttgtgcggcagtgcggattccgggcatagttcaaaaccgttcaagtttgtttaacaaagagatgagtgtgtcacctcttggggtgtgccaaataggatcatacatccaaatgagtggaatcggttcgcgtttgaggcaagaaagggagcgacttgggctgtcgcaaaaagtgtttggtgaaattggaggcgttgaagccaacgcacaaggtaaatacgaaagtggagggcgggcgcctaaagcagactacttgtcccgtgtcgccgaaaaaggtgtggacgtgttgtacgtattgaccggtattgccacccccattcaactggataacctgacccagattgaagaaaaggtactgggagactaccgcgcgatgttcaaggaagaccaggctgcgatccgccgcttgacgtctaccctggccgaacattcagcttcgctgaatggaaaacccaagccgcagccccaggattcctgacctgccgcccaacaaatagagccgttcaccctagggtggacggcgtctgtgtgttcaaactctatatatatgacgcttgcagctaggtctgcgccttggttttttgctaaggtgttcagcaacctataagaccatatcgcgaggtgtctgcttgattagggtgctagtagtcgatgaccatgatctcgttcgtacaggcattacacgaatgctggctgacatcgatggcctgcaagtagtcggtcaggccgagtccggggaagagtccctgatcaaggcccgggagttgaaacccgatgtggtgttgatggacgtcaagatgcccggtatcggcggtcttggcgccacgaccaagttgttgcgcagccacccggacatcaaggtcgtggtggtgaccgtgtgtgaagaagacccgtttccgacgcgcctgttgcaagccggtgcggccggttacctgaccaagggcgcaggcctcgccgagatggtgcaagccattcgcctggtgtttgccgggcagcgttacatcagcccgcagatcgcccagcaactggccattaaatccttccagcccaccagcgactcgccgttcgatgcgctgtcggagcgggagatccagatcgccttgatgatcgtcggctgccagaaggtgcagacgatctccgacaagctgtgcctgtcgcccaagaccgtcaacacctaccgttatcgcattttcgagaagctcgccatcagcagtgatgttgaattgaccctgctcgcggtgcgccacggcatggtggacgccagcgcctgacatgaccacaccgtttgatcccagtgccttcctctcgacctgcagtggccgccccggcgtgtaccgcatgttcgacagcgaggcgcgcctgctgtatgtcggcaaagccaagaacctgaagaaccgcctggcgagctactttcgcaagagcggtctcgcgccgaaaaccgccgcgctggtggcgcgcatcgcccaggtcgaaaccaccatcaccgccaatgaaaccgaagcactgctgcttgagcagacgctgatcaaggaatggcggccgccttacaacatcctgctgcgcgatgataagtcctacccctacgtgtttttatccgacggcaacttcccacgcctgagcattcaccgcggtgcgaagaagcagaagggcaagtatttcgggccctatcccagcgccggcgcgatccgcgaaagcctgagcctgctgcaaaagaccttttttgtgcgccagtgcgaagacagcttctacaagaaccgcacccggccgtgcctgcaataccagatcaagcgctgcaaggcgccctgcgtgggcctggtggagccggccgagtatgccgaggatgtgcgccactcggtgatgttcctcgaagggcgcagcaatgccctcaccgacgaactttccggcgccatggagcaggccgccagtaccctggactttgaaaaggccgccgaactgcgcgaccagatttccctgctgcgccgcgtgcaggaccagcagagcatggaaggcggtaccggtgacgtcgatgtgatcgccgccttcgtcaacccgggcggcgcctgtgtgcacctgatcagcgtgcgcggcggacgggtactgggcagcaagaacttcttcccgcagaccggtatcgacgaggacgtggccgaggtcatggcggccttcctgggccagtattacgtgagcagtcccgaacgcgacctgccgtcggagctgatcgtcaacgtggtgcacgaagacttccccacgctgatcgaggcgatccacgaactgcgcggccgcgagctggacatcagccaccgcgtacgcggcacgcgagctcgttggcagcaactggccgtgaccaatgccgaacaggccctgggcgcgcgcctggccaatcgacagcacgtcgccgcacgcttcgacgccctggccgaagtcctcaacctggacgaaccgccgcagcgtctggagtgctatgacatcagccactccagcggcgaggctacggtggcatcctgcgtggtctttgggccggaagggccgatcaaagccgattaccgtcgctacaacatcgaaggcgtcaccgccggcgatgactatgcggccatgcaccaggccctgacccgacgtttcagcaagttgaaggacggcgagggcaagctgccggatatcctcctggtggacggtggcaagggccagctgtccatggcccgcgatgtactcaacgaactggcggtgcccgacctgatcctgctcggcgtggccaagggcgccacgcgcaaggcgggtttcgagacgttgtacttgaatgatgccgcccatgagttcaccttgaagggcgactcaccggcgctgcacctgatccagcagatccgcgacgaagcccaccgtttcgccattaccggccaccgcgctcgtcgtggcaaaacccgacgaacctcaaccctggaaggggtggcgggcgtcgggccgacacggcgacgcgacttgcttaaacattttggtggcttgcaggagctatcccgtgccagcattgacgaaatagccaaagctcccggtatcagtaaaaagctcgctgagttgatttatgcgaatctgcacagcgaatagaatgcctttccacctcgtagccagttgtgccgatgaatatccctaatctgatcaccgttctacgcgtcctgcttattcctattttcatcctgttgttttatttgccgtacgaatggagttatgcggcctccagttcggtattcgccttcgcggccgccaccgactggctcgacggctacctggcccgtcgcctggaacagagcacgccgttcggcgcgttcctcgacccggtggccgacaaactcatggtcgccgtcgccctggtcctgctggtgcaggaacacggcaacctgtggctgaccctgccggccgccgtgatcatcggccgcgaaatcgtggtgtccgccctgcgcgaatggatggccgaaatcggcgcccgcgcccatgtcgccgtctccaacatgggcaaatggaaaaccgccgcgcagatgctcgcgctggtgatcctgctggccaacccgtcggacttctccttctgggtgttgaccggctacgccttgctgcttatcgccgccggactgaccttgtggtcgatgctccagtatctgcgcgctgcctggccgcatctgcgcaccaccgttgaaaagaaataaaacattttcgaatcaaggggttgaccggttctgataattctatagaatgcgcatcaccaagacgcgggaatagctcagttggtagagcacgaccttgccaaggtcggggtcgcgagttcgagtctcgtttcccgctccaaacacaaaaaaaagccactctaacgagtggcttttttttgcctgctgttccgtccagaatcgtgtccgccattcgaccagtctcgattggcgattgttcgcgcagcccaacggtcagcgcctgaaagcctgccttttggccatcgagacaatcaatagcgccggcagcagcagcgccaatgcaacccagggaatagcgctcgcccctcggcttcccaggagaacaccgccgatcacaccgctgcctgcaaatgccaggttaaacacggtgaccagcattgattgcgcaatgtcagcgccgtctccggcaacttcagccaaggcggtttgcaataaggttggcgcgccaccgaagctcatcccccacaagacgatactgatgtagatcgcactggcgggcaggtcacccagcccaagggcaagcgacaccaggctgaatgccgtcaggctgagcagcaccaggctgcgaagcctgccatcaatcagcgtgccgatcacccataggccgaacaaggccgcaataccgaatgcaagtaggccccgatcaacctgatcggccaagccaaccgaagccaggaacgctgcaatataggtatagagcgtgtaatgggccaggatccagagcatgaccaccgccagcaccggccgcacccccggggtttgcaagactctgcgcagcggcaggtgccgataggcgcgttgtccgggaaaatcaggcactttcagatagatccaggccatcagcaaaaggctgagtcctgagagcgtcccgaacacgcatcgccatcccagcagtttgccgagccaggcacccagcggtacccccagggccagtgctaaagggatgccgagcatggccagcgccatggcgcgaccttgcaattgtggggcgaccaagcgtctggcgtagccggccagcaggctccaggccagaccggtggcaatgcccaccatgaagcgcgccgccagcgtcaatgcaaaccagggcgacagggcggtgaccgcattgcaggcgcaaaacaccgcgaccgccagtaatagcaacaagcgccgaggccaaccctgcaacgcgagcgtcaaaggaatagccgccaaccctgagcccagtgcgcatagcgtcaccatctggccggcccacgcttgcgacacacccaatgcctcggcgatctgtggcaaaagtcctgcgggtaccgtttcgttggcggtggcgataaagctacccattgtcagcgccaacagggccgccagtggcagacgcccggtggtgagatgttcgagagtgttcgatgtcgtgaaagagccattttcaacatgtgatttgccagtcatgacctgtgctcagtgggaagggagggacaagtgtgatgaattgccacagatttgataattggcctaccatttgatgatctatcaaatttgaattgaatatgaccactgaccgattgggtgatatgcgtttgtttgtcgaggcggcggcactcggcagcctgtctgccgcaggacgcaaactggcactgtcgccagctgcggccagcgcgcgcctcatcaagcttgaggcggcgctgcgcaccaaattgtttgatcgcacaacccgtcagttgcgcctcacggaagaaggtcggttttacttgcagcagtgctgggtcgcattgcgggctatcgatgaggcggaagcggggcttcaagccagtcaaactgaagtgcgtggcaaggtgcggatatccgcgtctgccgactttggccgcaatcttttgaatgactggcttgaggcattcagtgtgttgcaccctgaactgtgcgtcgcgctgacgttgtcggattcggtgtcgaatctggtgcaggacgatattgatctggcaatccggtttgggcagccacatgaaagctcgatgatcgccaggcagttagcgcccaactggcgagtactgtgcgcttcgcctgactacctggcgcgatacggtgtaccccagacccctgctgacctggttaaccacaagttcatcgtgctggtgactggcgcagggccattgaacacctttcactttgtggtggacggtcaggcatggaaccacaccgtgcccatgagccaggcatgggagaccaacgatggcgcactcgcgcgcgcatgggcgttggccgggcatggcattgcacgtaagaccatctgggatgcggcagccgatatccgtgctggacgattgaaagtcctgttgcctgacttttgtgtcccggaggccggcgtctacgcggtattacatggcaaccgttaccgggttccccgcgtgcgggtcttgctggatttccttgtcgagcagttcgatcgcgcaaccgatgagctgctgtcaggtcttgaagtgcctgatgccaggcggtcgtaagccacgtcataccagataggggcgtggtcgctcagccttgggttttcctggcgcgggatttcttctgcgcaggttgagcgtcgccctcatcgagcgcgtcgccccccaggctgcgggtcagctgtacggcagcgctctgaaacagtgggtgcaacgtctgtgcctgttcggcggtcagtcggctcgcggggccggagagtaccagcgcgccaatcaggttttcccccgggccgaaaatcggcagtgccatcgaggaagcgtgcgggtccgtggcgcccacggagtaaatcggtttcatcattttcgccgccagggagtacggcgttctcaacgcttcggcgccggcggcgccgtccatggggcgcgtatcaccgggttgcaggtgcaggcgcaagtggtgcggtgagttcacgcgatagaggcacattcggtaagcgccatgcctgacataaaaggatgccgtttctccggtttcctgggtcagcgtgtgaagcaatggggtgatatgccgttccaggtcgagcccgtcctggtagacggtattcaagcgcatgatctccgtggccagttgatagcggccgtcggccaggcggctgatcaggccgtaattttccagggaaaccatcaagcgcatgatggtgcttttgatcagcccggttcggtcggcgagttcagccagctccagggcggtgtcgcccatcttgaacgcggtgagcacggtcagcacccgatcggccgaagcaaccccggtgactgccgggcgcgggcgaatttttaccatagggtggctccttgtgagggtggacgtgggctgtgcgtgagcagggtgcaaaatactgccattgtcgcgcgggggcaatgcgcgcgaaggattggccgcgcgcgctaaataaaacgctgctggcggggcggggcccggcagcagcgagagtgcagcctataggggaggtcagcccgcgctggcttccttgttgaactccacgggatcactcgatttgttcatgtgcttgcgtccgatcaacagcaccatgagtgcacccagcgcgcacagtgccgcgagcggcagcagggccaacgcatggctgcccgtggcatgctggatcgtgccgtagacgttgaccataaggccgccgccgatcaggttggccatcgcacccactgccgccaggcctgccgctgcggtggaggacgacagccaggtcgacaccagggcccagaacggtcccttcatcgagtaagcaccgatcagcaccatggacatcatcagcacggttgccaccagtgaagaggtcatcagcgccagcaacaggccggccgtgatcaacaacagggtggtcgcggtgtgccagcggcgttcaccggtcttgtcggagctgcggccccacaggatcatcaggatcgacgccaggccgtacggaatggcattgaccaggccgatttccaggttattcaagccaaaggtcttgagcaattgcggtgcccagacactcatggtgctgcctgccgccgaggcgccggaatagatcagcgccaatacccagatgtgtttgtggcgcagcagcttccacaacgagatatgcccgatggcggtcttgcggccgcgttcttcggccagtcggttggtcagccagccacgttgctcgtcactcagccatttggcttgctcggggcgatcggtcaatacgaacaggcaggcgatacccagcaacactgcgggaatgccttcgatgatgaacaaccagtgccagccgcgcatgccaaaccagccgtccaggctcagcagaaggccggacagcggcgagccaatgaagttggcgccgggaatggcaaccatgaagatcgcaaccatgcgtccacggtaggcggccggcaaccagtaggtgaggtaaagcagtacgccaggaaaaaagccggcctccgcggcgcccagcaggaagcgcatcacatagagcgagttggcgccctgcacgaatgcagtgcctgccgaaatcagcccccaggtaatcatgatgcgagcaatccagacccttgcaccgaagcgctgcaaggccaggttgctcggcacttcgaccaggaagtaagagacaaagaacaggctgctggcaaagccgaagatcgccggtgtcaggcccaggtcctggttcatctgcaaggaagccatgccgatattgccgcggtcgatgatcgccagcaggtagcagaggatcaggaacggcagcagccgccacgccaccttgcgcatggttgagcgctcaacggcgctgatttcggtagagctggtagacatgactctctcccattttgttttttttggagaagcgttatgacccgcactgctacttgaggcgtgcgggttgcatgaattcaatcactgcgcatagagatgacgattgaccaccgcgcgcgggtcgggcgcgatgccgccccagaaatcgatgatctgttgcacggccagcagccccacgcggtcccgcgcttcggcggtattggcgcccacatgcggcgtcgccaccagggtcggcaggccccatagcggcgagtcggcaggcggcggttcggggttgaaggtatccaggccggcgccgccgatctggcccgtgctcagggcttttaccaaggcatcggtatcaatcagctcgccgcgtgcggtgttgatcagcaggctgccggggcgcatgcgcttgaactgcgcctcgccgaacaggttgcggttctgctccgtgagcgggcaatgcaggctgatgatatcgcagtccgccagcaaggcatcgaagtcactgacctgctcaacgttgggcacgtcaggcaggtttttcaggtaggggtcgtacaccttgacctgcatgcgcagcgggccgaccagctccatcagaattcgaccgattgagcccaggccgaccaggcccaaggtcttgcccgacagctcgacaccgaccgaggtcgctttatcccaatgcccatcgcgcatccgtgcatccagcagggcggtgtggcgggcgacgctgaacatcaacgccagtgcatgctcggcgaccgactgcgcattggcgcccagggcaatggtcacgggaatgctgcgttcggcggctgccgcaatgtcgatggtgtcgtagcccacgccgtgcttggcaatgatcttcaactgcgcggacgcctggatcatgtcccgcgtcaggtgaccctggcgcacgatgattgcatcgggctgttcgcgcgcaatgatcgcagtgagttcgtcggcgggtaggtaggggatggtcggtatgacgcgcacgccgtgtgaggcggcgtgggccatggcttcggcagtcaattcagggccggtcagcaaaagggttcgggtcatgttgcgcaccttggtttttttatctgtgtgcagctggggggcgagtgacatgaccctcagcggtgactaaaacctaacataatgaaacggcgttgcaattaaaaagatttttttcaggtgtgaatgccgttctttggtcatgccgtagtgcctgtttttttcttgataaatcagcattttatttttgaatgagctgattttcatgtcttggtgcagtcagcgtttacgcgacgagctgcacgcaatgcttgcttgcaagtcaaaaaatgaaatgataatttcgaaatagcgtttcattttaattattctgcagtcgcgccacggcttacaaaaaacataagaaggtgaccccatgtccattggtttcagagtgctcgaacaagctcgcaaagtgcccgccgaatgggttgagcgctaccggacggtgcccgtcgccaacatcagcgactcgatgaaccgcatgaccgccggcggcgccagcctgcgtgccatgcaccgtcagggtgtgttggtgggaccggcactgaccgtcaaggcgcgcccgggcgacaacctgatgctgcattacgccattgacatcgcacagccgggcgacgtcatcgtggtggatgccggcggcgacctgagcaacgcactgatcggtgaaatgatggtcgcgtatgcggtcaaaaaaggggtggccggcattgtgatcaacggcgccatccgcgacgccgccagtatcggtgccggtgactttccgctgttcgccgccggcgtcacccaccgtggcccttacaaggacggcccaggcgaggtcaacgtggcgattgcgattgatggcatggtcatcgaaccgggtgacctggtcatcggcgacgaagacggcttgctctgcgtgccgtttgatcaggtcggtgaagtgtatgatcgtgcccacgccaagcatgctgccgaacaaaagcagcttgaacagattgcccagggtgaaaacgaccgtacctgggtcctgaaatctctcatacagaaaggctgcgagctccctggctgatcccgctacaccctggccgccgtgttcggccagggttcacgggcagggcgtcgcaggcttcatacctaaaggctcgctgtgacttctgttcccgtctcccgttggcccgcgccgatccgcgcattgagccatcgcaatttccagatctacttcgtgggtcagggcctatcgaccctgggtaagtggattcaacaggtcgcactggcctggctggcttatcacttgacgggttcggctgtattgctgggcacgattgctttcctgacgctgctgccccaattgttggtcggcccactggcgggcgcctggtcggaccgccacgacaaacgccgcctattgatgggcgtgcaaaccctgcttgccctgcaatcgctggtgttggccgtactcacctggcagcaatggatgggccgggaggtgatcatcgtcatggcgctgattctcggcttgctcaatgccctggaaacaccgctgcgccaggcgttgatcagcagtttcgtcgacgaccccagggacttgcccaacgcgctagtgctgaacgcaatgctgatcaacgccgcccgctttattggccctccgctggcggggttgctgatcaactggagtggcgaagccggctgttttctcctgaccagtatcgcgtttggcatgttgctgatcgggctgggcagagtgagaagccgcgagcaaaccaaggcccagggttccaccgcagagattttccgtgaaggcctgcgctacctgtggcgcacacttcatattcggcgtttgctgatcagcgtgatcatggtcaacctgctggcctcttgttacacggtgctgttgccgatcctggcaaaaaacgtgttcgccggcgatgcgcaaaccttgggttggttatggggggccgccggtgccggggcgtttgtcgcgacgattttcctggcgtttgtcggcggtgcgtcgaacctgcaacgcatcatcggcgccggggcactggtgtgtgcgatcgccttgtgcgcgatagccgccaacccgccgttgtggttcacgctgatcgtgctggcgggcttggggtttggcatcaccgtgagcaatgtcagcagcaacatgaccctgcaaagcaccgcgcccgaggcgctgcgcgggcgggtgattgcgttctacatcgccatgcgtttcggcttcgaagcgattggtgggttgttggcagggctggcggctgcagccttcagcgtgcagtggaccttgttgctggccggtgcactgctgttggcgtatcagggcgtcagtggatggttgtcagttcgcaggcaccgttctggcagggggccgtcagggtgacagtcggttcgctgctttgctggcaggcgactcgacagaacgcggcgctttaaccgacaccgataaccgcacgttatttcatgtccctggcctggatccacagcaccgcatcctgggacaggggtttgcccttgtaggttttggtcgcgccgatgttgagcgccgcaatgccccaccagccagcgcgtggcaggccgatggtcacgatgccttgggcatccgaatacgtactcaaggatttgaaggcggcttggggggcagtgacatagtccttctggccaaaggcgttgtttttgatgtcgaccgcatgattgacgtactcgatttcgatctcggcgaatggaacaggcttgccgtcagccaggaccaacgcgcggaacaccccacccgtccagtttgcatacggcttgttcaggggttggatctcaaccgccaacccttggggttctgacccattgccgggcacgccgcccacgttcacgacgagcttggtgaactgttggatgtagacgccttcctcggtttccagatacggctcaggttcgagtacgaaaatatggtcgcccaggggccgcaccaactcccgtggaatcgacgcacgataggcggtcactggtttttcgcgaccctgccactggacgggtttgaggtattggcgcaggtcggttgtttttccgccgtggccgctgatgaggctgaaggccttgggttcacccatggccatcgtcggcccaccggagaacggatgcgtgaacactatagcgaagtccaggtcggccgcacgctgcagcgcggtttcgtcaaggtagagcatctggaagtgcgcttgcgctgcgcaggtcatgcaaccgaaggtcgcggcggcaaaggcttggagcagtcgtcgtttgatcagcatggtcgggctcactttgagatgtcagaggactggatcgtggcgccatggttttcaccaccgaggaattccaccgagtacgcgccggcgggggcctggaacgtgtagctgttgtccttgtcgacagtcccttcgagcaatagcttgttgctggggtcctggacatggatttttcgacctgcggcggaactgccgtcggtgtagccggcttcacatttcacccagtcatcgtgctcgatgtagcagtcgaaaacggggccgtgggccagcgcggcctggcagaacagcagggcacctgccagcagtatcgggtgggccagatctcgcggtttcataaggtttcgttctccatggtcgaagtggatcactgcggcgtcgccgtttgggcggcagccactgcgggagcggccggcgcgaaggccgccagcaaggcgtcgaggttggcactcagcagcgcctcgtagctgttggccgggttggcgagcatgcccgggttgccgctatccaggatcagcaggcgtgcgccgccgtcctcgatggcctgtgcaatcctggcgtcaggcgcccatttgtgaaccaccacgcggatatctcgctcgcgaaggtagcgggtcagggcggcgcggtcggcgtccgtccagtcgatgtcctggcgcacgaaccaaccgtccacatacacgccgaactcgccgaacaggtagaccggctcgctgaccagcgacagcacgcgcaggtctggcactttcagcagccgatcgccgtagtcggccttcaggcggcgcatgcggccgtcgagcgcagcgaggttgcgcgcgatccgtggcgcgtcggttggggacagccgtgccaggtcggcggcaatcaatgccgacatgcgcatggcattgatcggccccagccaggcgtaaggcgacgggccgccttcgccgttgcgggcgtctgcccagggcacatcgtttgccggcacgcgtgtcacggccacgccgggcttgaggctgtcccaagagtgcgacgcatcgatctcgacgatccgcaggttgtggcgccgcgccgtcgtatacaacgggtcggcgcgccacaggctgctcagggtgaccacggcgacggccctctggaacaccgccggctccaggcgcgacagcgcgttggcctggctttccaggggcacggcggcgtccagcgggacacgtacgacctcgatgtgcgtgccttcgccgagtgccgaggtgagcgcatacatcgccggcagggcgacgagcactggctgttgctcctgcgcaaaggctgacggcacgccacccagcagcagtgcgaacagtgccagccaagggcgaattgaagtgttgaaccttttcatacgctggcccctttgaactgcggcgcggtgccgcggatgagggtggtgaaggcaaataccaaggctgcgacgatcacgatggcgccgcccgtggggaccggaatatggaactgcatcggtgccagaatcccgaccacacaggaaaaggtcgcaatcaggaccgcccacgtgaccaggcccggcagtgagcggctgatgttgcgggctgcggctgccggtatcagcagcaaggcctcgaccagcacggcgccgatgatcttcaagcaggcgaccgttaccagggtgaccaacaccacgaacaggtactcgacgctgcgcacctttacgccgcgcgcatgggccaggctcgggttgaggctggagagcaacatgccgttgtacaggggcagcgcgatcagcgtgcaaatcaccgtcacgcccagcagtacgttcatgtcggtgtggtcgaccgccaggatcgagccgaacagcacgccttccatgacgtgtgtgttgattttcgcggacacgaacagcagcaatgaggcaccgaccgccagcgagatggacaggaacacgccgatcaacgtgtcattggccagggtggtgcggtgctgcgtgtacttgagggtcagggcgaacagcaggcagaagccgaacatcgagaagtagggcgaggtgtaggactcgccgatcagcacgccaatggccacgccggtcatcgccgcattgcccacggactggctgaagaacgccatccgcttgatcatcaccatcgaacccagcactcccagcagcggcccgatcagcactgaacacatcagcgcattgatcacgaactcgtattcgaacggttgcggcaacatctggctcgcggcgagcgcctggaggtggtcgcgaatgaagtcgtacagggcattcatcgaatggcctccagtcggctgtcgagctgatcggcagggccgtgaaacagcacccgttgattgataacggtcacggactgcgcgatacgcttgacctgttcgaggtcgtggttgatccacaaaatggtcaccccacggcggttcagctcggccactagcgcctctaccaggcgcacaccaggctcgtcgatcccggcggtcggttcatcgaggatcagcagccacggcatcgggctgatcgcctgggccagcagcacccgctgacgctggccaccggacaggctgccaaagggttttttacccatccccgccatgccggtacgctccagggcctgggcatgggccgccttggcggcgcggcttgcgccgaggaaggcgggccggcgttgacccaacagggccatgagatcgttcactgtcatcggcacgttgcggtcgaagtccggcaactgcggcacataccccatgggcgtcgtgggttcaccctcgagccggatcgttcccgaatgcggcatctggcccagcagcgcacgcaccagtgaggttttgccgccgccgttggggccgaccaggcagtgcaatgcgccggcctcgatgcgcatgctcacttgatcgagcacctgcgtgcctcccagtcgcagggagacgttgtcgaacacaatggcggggccgcgcatcgcgtgttgctccttcagcgcgttcattgctgcgtaaactcgacggcttgcgccagggtctcgaggttttcgcgcatcgcgacctcgaattcgtccgcgctgtagctatcgccggtgatatgagacagggcgaacaccttcacgccggtggcggcttcgatgggtttggccaggtcgagggagaagttcttttcggcgaacagcaccttgacgttggccttcttgatcgcctcgatggtgttggccaattggcgtgccgtcggtgcgacgccatggcgcggctcgatcacggcgcttacgaacaagccgaactcctgcatcatgtagtcgtagccggcatgggtcgtcgcacagcggaacgacgacaggtccagtgcggcgaagcgcgtcatgaagcctgcgcgcagcgcacggatacggccggcatacgccagcgcattcttgcgatactcgcccgcgttgtccgggtccagctcgcccagccggcgagcgatttcgaacacctgttggatcgctgccgtggtcgagacaaaggtgtgcgggttgaccaccttgaccccttcctggtcaccgccgatgggaatcagcgccaccgtggcattcgcctggataatcggcagcgtttgcgtgcggccggcggccttgatgatctggaaggcccattcatcgtgcccgataccgttgaccaccagcacatcgatattcatcgcgcgggtgatgtcatcgggttgcggctggtaattgtgcgggttggcctctgccggaatcagcgcaatgacttgcgcccgatcgccgacgatattggccacgaagctgtagtagggatgcagggtgataccgattctgagtggcttcgccgaggcgaaggccgggccggcgagtgcgatggcggtgatcagcacccacagcgcgatgcaacggcgccacacggcgcgatgtttcgtagaaacagtcatggctgggttccttttacgcgttcgatttcgctggcaccgtcgtacgggatgacttggcgccaaccatcgccgaccagggattccggcttgacgatggcggggtagggcgcgttcgggtcacggtggacccagatcgtcgcctggttggcccacatcacaccggcgtgggcgtggccgatgatcagcaggtaggcgctctggcccggcgcgtggccggctgagccgtaatagaccgtggcgccctggcccagggtggccttggacacatcgctgacggcaggggccgccgccgtggcgtcgtccgctccacccggatgggccaggtgggtgccgggcagaatcaattgccagtgcacctcgccattggccttccagaaagcatcacggtagaacggcggcagcaacagctcctgtgcacgctccagggtgatccagccgccggtatcgttgttgttccagatgatttcctcgccggccggcagcaaggcgctgtggatggcctgatcgaccgcacccaagccgtcaaaggaacgcacctgccagctcagtggggtgggggggccgactctttccgggcgcagcatcacatagccggccacgctggcgatgacggccagggtcgccagcagcaggcccagtgactcccatgcgccggagcgtggtcgcacctgggtgatcgcagcggctgggcgcgccatcagaggaacgcaatccagcggcccaggaagaccacgccggcccacaacagcaacgagctgaacccggcgacacgcgcctgacagggaggcggcagcgtcgtgtcccattcggcaattcggcgaaaggcgcccaagtggaacaccgccatgttggcgccggccagcatcagcaggcccattttcagcaggaacgcggtgttctgcacataggtcgtgccattggcacagaacatcagcaggccggtgatcacgcaggtcacgaacgcgacccaggtgtagggcagcaaatcctggatcagtttcagcgcgccgcgccggtgggcggttacgccaagcaggcgcaggtcaacgacggcgatggtgccgtagacaatggcgatgccgattacgtgcaccgattccagcattggaaaggccgagcctgactcgcggatgaacgtcgcgacaggcgtgtcctggatggcttgcagcaggggttgaatatccatggcgaatacctgagaactttcgttgaaaacacttagatcgtgtaggcgatccagcgaccgcaaatgatcacgacgcaccacaaaccgatcgacagccatgcgcatgccttgaccgaacgcgtcgtgtcgtcgctgcctgccgtgccggcagggcgcagcaacggacgccgcagcagccaggtcacgctgaacgccgtcaccaccaggaccatcttcagccagaacgtggagttgacgagtacccggtcaggctcggcgatgatcatcagcaacccggtacacagcagcacgatcagtgcattgcgcatccacgggtagtaacggcgaacgatgccgcgcaagggttcctcgcgggcgaacacccccgccagtcgaaggtcggagatgagcgccgagccgaagagcacggtgatggcgatgatgtgaatgctctgcaccgtggggatgacccacaggatgtcgcggatcgcagtgctgaacggtgaggcgtagatccaggcaatgatgagtgaagatgacatcggcttttcttccgcagtgggttagaagtcttgaggggttgcgatcggatgcagccccgccgcgtcctccggcagcaagtagccttccttgatcgaagccgctttggcgtcttcgaatttctgtgcatagcggctgaagcttccatagtgcttgcccagcacttccttcgaataaggcactttggtgtcgtagatcagcccgcagccggtctcttgatcggtgaggtaggtggcgctgggcacctggatccacggcgggcgcacaccgccttgcaggttgccggtggcgggcgcccgcgcggcggccttgccatcacggaccacccggggcgcgcggggcatgggtttgccgtcgcgtacccattggtccatgccgtcgagcagtgccgagaccacgtgctcgaccggttcgtcatacagcgtctggcagcgcgggtcgtcgcccttgccgacgtcggccgcgagcggttcggtgtgctctgtgccgaggtcggccaggcgcagatggggcatgccggtcacttcgtagtagcgaagctgcggggtgtcggtgtcgggaggcagtgggataccttcgatcacgtcgtgcatcagttcggactggctgaagacggtcacgaacggcacgccttcgggcatctggcgaggtactcggatcacatcgccgccgacttctccgtaggccatgcggcccgtcatgtaagcgtcgatcagcggcgtatcgtcgggcatgcgccattgctggtgacgcccctggtcgagatagtccatccagacctgcgcggtgacggcccagctattcacatacacgcgctgcacatcgaggcccgccagcggactctgcgccccattgctcttgagcagcagcgccagttgcgcaccgatgccctgggactgtggcacgaagggatcgggcgctgcgccacgggtgaaccgtgccgggtcgtaataggtgcccagcggcgcatagcgcgcgtagtcgaagcggcgcatgaactcgaaattcacgatccgtccgtactggtcgatttgcgccgcctcggccgccggggtgtccgaaatgaacttggggtcgactgacggcttgttcacattcagtgtgtacccgacgtacgcatagccgcgccgcagcaagtagtcacgcgtcagtatccagcctgcgccacgctcgccgaaccagctgaacggctcgatcaccaccgtgccattgaagcgcgccgggtcggccggtttgcgcaccagaatgcgcgtggtgtagggcgcttccagcaaggttttaccggcggcagtgatggccggggcgacgccttgcaggtagtactcttgctcgatgtagccgtagtggtcgaggtcgctgtactcagtgcccgggcgtgtcgccgacgacagcggcggcttgtcggaaggcggcaccgcgatggccgtgggcatgcgcggcacctcggcgagcacgctcgacgcgatgaacagcgacaacgcgatgctgatgggggtcaggcgtttcattcgcaaaagctccggcaggggtgggagggtggcgtcactcaaggctcagggaagccttgccctcgctgtcgatcacgatctggttgttctcgcacacgtactcttgaatggcgtagttggagcgcttgtactcgaacgtaaagcgatacggagtgttgagtacctgcgggtcttcgatcaggacctggttttccaggtgatccggcccgcgcaaccgcatgcgttcagtgatcttcatcgccggcccgtggggcacgtcgtagaagcgcacatcggttcgcacgcgctgggtctcgacgaccagcgtgtcgccttcccagtggccacgcgaatggccctggtacaacgggtcgagcttttccaggggcggcatgggctggttcaaaagaatccgccgcacctgctggagatactcgccgaggatgatcacttgcttgtcgtcgcgaatgatctggatcgggaacagcgctgccatcatcgtcggcatgccctcgggcaggcacttggagctggtggttgcaatcggcgtgccggcctcgttggccacggcttctttcttcttcagctcggcgtactcggcggcgtaggacgccttgaggtccattgggccgccggggtgcaccgggtcgtccgggttctcgccgaaccagtcgtccggggttctttcccaggtgccgctgatgtctggccgtgtggccacgccgtgtttgtcggttggggggtttgacgctgtcgcggcgctgctcatcgcggcgaaggtcaggaggaccacccccaggaagaccatggcggtgttggcggtgcgtgctggtttcattgaaatgtctccgcgttgctggtttgcccagttctgttgttgtcgtgctcgcaaagggttgcgtttaaccgccgcccgagagcaccacgtcgcccatcttgatctccaccagcagcccgcccggttcgccgtttttcaacggtttgaacgacacctcggcgtttgcgccggccttgaccgagtcggcagtccagcctgtgcgctgcagcgcgttgacgctgcccgtctcgatcttgaagcgctgggccggcgggccgggaacatcgacgtagatcgtgatgtgcgggttggtccaggcgaagcgctcgaccacacccttgatcgtgattgtctgggtctggtcgaacagcgcgaaggaatggtgggcactggcaacaggcgccaaggcactgcaggcgatgagggtcataaggcaaagcctttgacggagcgacggaaagcgtgacgaaggggtcatgacgggtgcctcggtttttatggttcttatgggcccagcatagggtgctcgcgctcactggccgtagccgaaaacggcaaccattgaaggtattcagggggggtggcgcaggtgaggtatcgcgcaacgacagaacgacgcgccggcccgtgcagatgctgatttgggttaccgcgttggcgacccctgccggaacactcgtgtctcgcctcacaactataaaaacaggagagacgtcatgcgcattcccccctacgcgccattactgtcgctggttgcactctgtgcagtcggctcacaggcacaggcttatacgctgtacaacgaagacgacggagcaaccgtgttgaatgccgacctgggcgccgcattcggctggtttggcagtacccataactacctgggcgatccgcagaaaaaatccggcggcatgcactggcaggagggttacgtcaaatacggtctgaccggcaccacggataagctggttgccggttcggtatatggtggcttcagcctgctcagcagcgggtcatggggtgacggagacatgggggcgaccacggcgggcaatgagcgacgaaccgccgtggaagacgcgttcctgggctggcgatcaggtgacctgctacccgccctgggcaaggatggcgtggatttctcattcggacgccagattgtcacggtggacggctttctgatcaccgacgatggatttgacccgggtaacgccttcaaccccatcgagggcgtgcaggatggccgcttcaaccgagggggcgccttttacctgggccaacgcctggcgtttggcaatacggcggtgctgaagctgggcggcaaggaagggttgcacggcagcttgatatggctgaagtccgataaccctgggcagtccaagaccgaactggccgtgggcactatcgattacaccacccccatcggttcgatcggttcgacctacgtgcacggcctggatgtggaagagaaatacgccttcggcgatcggcttgagcgcaagggcatgaacgtctacagcattcgcgggcagggcaacgccgggatcgagaacgccgattttgcgttcgaggtggcccgccaggaaaaacgttcggggtcacagcgggcgatgttcttcgacgcgggttacaccttcgtcgatacgccatggcaaccgacggtcagctaccgctattcgcgctactccgaaggctgggacttcctgttccagggcggttatcgcaagcgcctgcagggcgaagtcgggcttaattatgcgggctccgtgacatcgaacatgcagatcaacgacgtactgctctcggtcaagccgaccgagaaattgacccttaacgcgatggcgttcgactaccaccagctttcccgccgtcatgagctggatttcgctgcgcaggagctcgatctgtttgtggattgggcggtcacggagaacatcacgctttcgccgctggttggcttctacaagccgcagaagtggctgggcaacggtggccggcagagcggcgacgcatcaaccaacacgtacatgcagttcattgtgtgggcgacgttctgatgattcattgaggtttgttgcggggccgagcaggcgttgacgttttgcgtcaacgcctcatcccgtcagagcatgcggcgcaacacatcgttgcgtgggtcccggtcatagaagcgatgcttgagcgcgcccgccacgtgcagcacgatcaggacaagcaaggtgtaggcgaggactttgtgcagccattggaagaccgcgaaccaatcgtcattctttggcaacagctccggcaggttaaccccaaaaaagaacaccccgtcgctcatcgtgtacgtgctcgacatggagtaccccatcaagggcacgatcaccagcagtacatacatgacgcgctgcgtcaggcgtgacaaaaccctttcgtaccccgccagcgtttccagcggctgcggcaacctgggcgtgcgcaagcgcacagcgagctgaaccagcaccaccaggaacgtcaacaccccgaaggacttgtgccaggggtagtaaagctcgtatttgctcgccacctcatcgttcatgccggtcatatgccagccgacccagagcaggcccaggacgagcacggcacgtacccagtgcagcacgcgcagggaggtcgggtaccgatcgattgtcgattgatctattgggttcatatcaggctctccacggagcgatgcacggttcaatggccaccctcgacgtgggagggtggctcggtcagggcgcggtgatcaggtgggcagcagcacggtgatgactttctcctcggtgtaggccagtgcgccgctgaacccgccttcacggccgatcccgctggtcttgaggccgccccacggcaggttggcgtccaacgggctccaacagttgatccccacggcgccggcttttaccgccgcggcgacgcggtgtgctctggccaggtcgccggtccagaccgtcgccgccaggccgtagctgctgtcgttggccagggcgatcgcttcggcttcgtcgtcgaacgttatcagcgtgccgaccggtccgaagatctcgtcccgggcgatttgcatgtcgttgcgcgcgttggcgaagatcgtcggacgcacgaaccagccctgcttgggtgtcgatacgccgccggccaacaaggtcgcaccttggtcgatgcccagttggatgtagcggttgacgcgatcgaattgggctttcttggcgaccgggcccatctgcacgccgggctggcgaggatcgcccacgttcaccgcttgtgcagcctcggccagcgccgcgccgaaccgctcggcgatgctgcgctgcaccaggatacgcgaaccggcggcacacacctggccctggttggcgaacaggccgagcgcgcagccgcgcagggcgtcgtcgaaggatgcatcgtcgaacacaatctgcgggctcttgccgcccagctccaaggccacgcgcttgaacagcacgccggcggtgcgctggatttcgcgcccggcctcggggctgccggtgaagctgatcttggcgacatccgggtgttcgcacagggctcgacccacttcattgccgtagccggtgaccacgtttatcacgccgtccgggaagcctgcttcctgcgccagctgcgccaggtacagggctgactgcggggtttcttcggaaggcttgatcactacggtacagcctgccgccagcaaggcggcgagcttccacaccgtgatcatcagcggtgagttccagggcacgatggcgccgaccacgccgactggctcgcgcaccgtgtacgacagggtcttggtgccgaagtagcccccagtcggaatggtccgaccttcaagctggttggcccagccggcggcggcgcgcaggttggcgatcgcgttgggcaggtccatccggcgtggttcgatgggcgagcgcccgatggcgttggcgtccagatcggccagcacgtcagtgtcacgctcaaccaggtcggccagtttcgacagcaaccggccacgcagggcgccgttgagctggctccagtcgccgctttcgagttggcggtgtgcagcggctacggcacggtccacgtcctcgctcgtaccccgtgcgcagtcgccgtatacctgctcggtcacggggttgacgaggtcgattcgacgacggtcgaaggcttcgcaggaggcaccttcgataaaatggttcaagtgctcagtcattttggggtccttgagtgatgggcaaaatcaagccttcagggcagccagggcgtcgccgaagatatccagtgccttgaagaacagctcacgcgagatcgtcagcgagggcatcacgcgcatcacgttgctgtaacggccacaaggaatcatcagcacgccgtggttgagcaggtagcccatcagttggccgattttctcgcccgccaggggcgccttggtgagcgggtcttcgatcagctcgataccgatcatcaggccgcgcccgcgcacttcgcccaccaacgggctgttgaaaccacgaatatgcgcctgtgcctccagccccaatgtgtgggcgcggttgagcaggtcgagttccgggtcctggaggatgctgatgttggtcagtgccaccgccgccgacagagagtttgccgcgaaggtgttgggcatggagccgtcgggaatctgcgccgccaggtccgagcgcatgatcaggccggccatgggcaggtcgctgccgatgcccttgccgaaggtgagcatgtccggtttcacgcctgaatgttcgaccgcccacatcttgccggtacgccccgcgccggattgcacctcatcgacgatcagcaacgtaccgctgcggtcgcaggccttgcgcaacagttgcaggaattcgggtgagggcggcacgtagccgccttcgccctgcactggctcgacgatcacggcggccacgtcatcggcggcggtgtagggggtgttcagcaggtagtcgatgtactcgccggcgatctgctcggcgcttttgtgggtggtgtcgaaggggaaccggtaggcgtaagggtagggggcgtggatcacgccgcccatctgggcaccgtagcctttgcggtacgcggtgcccgtggtcagggagcccgatgcgttccagacaccgtggtagccgccatggaaggcgatgatctggtggcgtccggtgatgcgcttggcgaacttgatcgcggcttccagcgcgtcgctgccgctctgggtgaagaaagtgatgcagtcgccacgcaagccgtcgggcgcgatctcggagagcttggcggccagctcggtgcgtcgggtgctgttgatctcgagggcatgcatcagcacttccgactgctcgcgaatggcttgcaccaccttcggatggcagcggcctacgctgctgacgccgaccccggcggacaggtcgatgtaggtattgccgtccggatccttgaaggtcgcgcccaatgcgcggtccatggccaccggcatacgtccgccaccacgtgccattgactcggtgcgcgccgacagcgccagggcttcgagggtcctgggcccaggaatggtctcggagatgatccgtggggcatccgcaaaatgcagggattctagtttggcttcactcatgacggtctctctggaatgtcgattcaagtgtgccgatcatctccggggtgcattccagacgggtagcccgaatcggcacatgggaaagcgtgtccgtggcgggctgctgccaatcggaaaagtgacaaataatttgcaggatttctgctatgtgcgaatatcacctgggaaggcaagctaaaaataagaatatcggcagaggctttcggcattatgaaaaaccagaccatcagccattcccaggacattcacgttcacgccgccactgttcagcagtggagccaggactacagccaattgacggctgggtccgccgaatgctcactcatgcagttgacgaccgccggttgccacgtattccgcgagcagatcaaccagcgtgtcgtgcaacacggcgtctctccccgaggcaagatgtgttttgcggtgccgatcaatgttcccggtccgattcgcatgcaagggcgggaggtggacgacagcagcctgttctttctccatggcggcgaggagttcatgttccacatgcctctgggcatggagctgttgtccatcaccttcgagcgtgaactgttcgaacaggccttggcgcaaaccgcttcggcgaaggagctcaacctgttattgcgccaaccggtgatccgggtttcggccacacggttcgcccaggcgcgtcgtcgtctgctgacgctgttctctcaggccctggtgcaggaagagctggacagcacgcgcgatttgcaacgcgagcaggcgctggaacaggccatgttgggtgagctgctgcaactgatgactgacccggcctgcgacaagcaacagcgctccaccagttccacgcgcagttttattgtggagaaatgccatcgcctggcgaccgagcagatgctgaatgtgccgagcgtcatcgagttgtgccagcgtctacaggtgagtcggcgcacggtgcagaacagtttccgttcggtgactgagacgacccccctcaactacttgcgctcggtcaggctcaacggtgtgcgccgcaccctgatgtccactcccgcgtcccacctcaccatcggcgatgccgccgctcaatggggcttctttcacctcagccattttgccgccgaataccatgagctgttcgcggaattgccctcccatactgcccgtgccgccattacgcgttgtgcttcggtctgatcgaactcacaaggatgtagaacatgaatagcctgcgccgcctgctggcggtcttcgatttgtttcgcccggaccagcccgtcattgacgtcgacatcatttgccgggaactcggttatacaccggccactgcctaccgttacctgcgagagctgggggatgcgggtttattgaagcggttgccccggggttatgcgctgggcccgcgcattgtcacgctggagcaattgatgactcactatgatccgctgctggcgtgcagtcaggacctggtcgaacagttggtcgccgacacaggcctggatgcgttggtcagtgagtggcatggcgactcagtggtcaatgtactggtccagcgtggcaccgatgccggaccggtgggcggcggcagggggcagccgatcagccttttccacagcgcgacgtcccgggtggtattggctcacttgctgccacgccagatccgacgcgtgtatgacgctcacgctccggtcgctgacagcccgcaacaagggctggaatggaagaccttcaccaagagcctgcttgccattcgcaagcaaggctactgcgtcagcgacggtgaactgcacccgggacgcagtggcgtcgccgcgccgattttcgacgacaagcggcgggtcatcggcagcatgaccctggtggggcgcagtgaacgcttccatgcgttccagcagagctacctgcgttacctggtgaccggcgcggcgtcggagttgaccagccgcatcgccttgcgctgagggcggcggggcaggcggcgcgacagatgaccgatttgggctaccgaagcgttcccggcaggcctaggatcaggccctgcgtgcgatcagaacgacaagcgactcggtgacggtgcgagatggactgcgccgatcctacggtgactgcctcatcctataaggtcaacaaaatgagcgtgactttgccccacaatacgccccacaacccgccccacaacgcgcccccaaaaaaacccgacgaaaccctcgacacgacgtcgcccaaccgctctaccgagctcaagcgtggcgccctgggtgtcggtttcatcatcttcttcgtggtgtcggcggcgagtccgctcagtgtgatcgccggcggtttccccattggcatcatgctcggcaatggcgcgggcaccccggctttgctgatcctcgccttgctcgtgctgctggcgttctcggtgggctacaccaccctgtcccgacatatcaccaacgccggcgggttctacgcgttcaccgcccgtgggctgggtggcctggccggcggcgctgccggggtattggcgatgtttgcctataacatcctgcaggtcggcttgtatggcatgtttggcggggtggtcagtggcaccatgcaaagcgcattcggcctggtattgccctggtggtcctactcgctgatggcgatggcgagtattgcgatcctggggtatcgcaagatcgacctgtcggcgcgggtgctgtcggtgatggtgatcgccgaatacctggcgatcctgatcctggatttcgccattctcaaatccggcggcgacagcggcatcaaccttgattcattcagcagccaccacgtattcagcggcaccccgtccatcggtttgctgttctgcttcgccgcctttatcggctttgaggccaccaccatctacggtgaagaggccaaggatcccctgcgcaccatcccacttgccacctactgttcggtgttgctgatcggtggtttctacgcgttgtcggtatggtcgatggtggtgggggtgggggcggacaaaatcgtgccgatgctgcaggcgttgcaggatccgaccacatttatctatggcatgtccgaccactttgtcggcccgcacctgacccaggtcatccgcgtgctgttcatggtcagtatctatgccgggttgctcgcctttcacaatgccgccgcgcgttacttctacgccattgggcgtgacggtttgttgcaccgccagttgggcaccacccatcgcgtgcaccagagtccccatatgggttcggccttgcagagcctgatttcggcggtggtggtgctgattttcgctgcgatggatgccgatccgatcctgcaattgttcgcctggctgtccaacctggcgacgttgtgcgtgatcttgctgatggctctgacttctgcggcggtgctggttttcttccggcgccaccccgagctcaaggtcggtgtttggcgcgggcagattttccccggtttctcctgccttgcactgtgggtggtgctggtgctggcggtggtgcatttcgatgtactgaccggtgccagccaactgttgtcctacagcctttgcgccattattccgctggccctgttgggtggtgtgttcctggcggccaggctgcgcaaagtatcccctcagcggttcctggccctgggcagccacaagctttaaggcgcggcctgcgctgctggcttgctcagcttgaccagcagcgctgcaatcaacagcagggctgcggacgccgccagcaccgcgacaaagcctgcgtcaaacgccgaacgggcggccgcgctcaacatcgcgcggccttcgggcgacaaggtttcagcgaccaccagcgcatcgtcaagactctcgaatgtcgccgggttgcgggtcagccacgctgggatcatcacgcccgccgcattggcatagatcgctgacagcaggctgccggcgagcgtcacgcccaccgcgccgcccagctcaaaggacacttcttcgatggacgccgccatgcccgcctggtccgcaggcacgctgagcatgatgctactggatgaagcggtcagcgcggcgccaatcgtaaagcccagcagcgcgaggctgatgatttgcgcaggtgccgtagcgttgtagagcaacaggtaggacagcatcgccgctgacgacaacagcaatgtccagaacagcatgcgttggttcccgaggcgaggcaggtaatacccggcaagcggcccggagatgaacgagcccaggggcagcggcaggatgaacaatgccgcctccagcggcgacaagcccagcaccagttgcaggcgctggctgaacaccagttccatgccgatcaacgcagcggctgataccaccgctgaaataaccgcgtttctgaaccccggcgccttgaacagcgcgaggtcaagcatcggttgtgtggctcggcgctggcggcggatgaacagcgtcagaaacagcgtgcccagggccattgccaccagcatgccctccaacgacgctgcccgcttgccgagctccttgacggcatacgccacgctgatcaacccgatcatcacctggagcgaccccagccagtcccagcgtttgctgatatcccccggatgattggggatcaacagcgcgcccaccaccaacgccaccagcacaatcggcacattgatcagaaagaccgaaccccaccagaaatgctccagcaacaggccgcccaccaccgggccgaacgcagcgccccctgacgcaaccgaggcccagatgccaaatgccatggcctgttcgcgtgggtcgctgaacgtcacgcgcacgatcgccagcgtggcgggcatcatcatcgccgcgccgaccgccagaaacccacgcgcgccaatcagtacgccggcggtgggtgaaaacgccgcgatcagcgagaacaggccaaatacgccgagcccgccgatgaacaggcgtttgtgcccgaggcgatctccgagcgtacccatgcccaacagcaggccggcggcgatcagcgcataaatgttgacgatccacagcttctgcgaagccgaagcgttcagctcgcgggtcagcgtgggcagggcggtgtagagcaccgtcatatcgatgacgatgagcagcaatgcgctggaaataatcgcgaggatcagccagcgtcgaggagaggtcatgggacgcgctcggtgatggaaagaggaaagccggtgccggtcagtctgtataagccgccggccccttacacacggaaatgggccaccagttgttgttggtgattggccatgtgatgcagtgagtcgctggcttttgaagcatcgtccatccggctggcgagtgtttcgctgataccgcggatgtcgctgacccgatggctgatgtcttctacgacggtgctttgctccatggcggcactggcaatctgctgattcatctgttcgatcacgtctacggcctgggagatgcgctccagcgccacccgagtctgttgcacctggaccacgctgccgctggcttgctcgcggctcagttgggtactgtgcaccaccgactggctcagctgctgcaaggtctcgatcaccgtgcgcacctgttcgactgaatgctgggtgttgctggccaggtgccggacttcgtcggccaccaccgcaaaaccacggccctgctcgccggcccttgccgcttcgatggccgcattcaaggccaacaagttggtctgctgcgcgatggaactgatgacgtcgaggacctgaccgatctgggcactgctgtcggcaagcgcgttgacctgcccaagggtggtttccaggcgctggtcaagggcctcgatactgcgctcggcggtcgagaacaccgcctggcctgagcggctcgcgctttctgcggcggtggcggcgtcggcagcactgtgggagtggcgcgccacttcctgtgcactggcgctcatttggtgcagcgcggtggccgccaactccacctcgtgatactgacgctgcatgccggcactgacttcacgggctatgccagacgaggtgtcggcgctgttgcgggtgtccagcgacgcgctctggatatcgcggataatcggctgcaacgtgtccaggaaccggttgaagccattggccaagtggcccaactcgtcgtgcctgccgacgggcaggcgctgggtgaggtcgccgtcgccttcgacaatcgcatccagcaactcggccattttcagcagtgggcgtgtcacgccgtgagcggccagccagatcagcaacatgcccaggctgctggcaagcatgcccaggcccaggttgagccagttggactcacggcttttgctgtccaggtcgttttgcatttgccgggcaggtgcctgcacccgtgcctgcgggactttgatcgccagttgccaggccgggccgcctgccacggtctgcacggactgacgtatatcgagggtgtccccggagacttcgccactgcgtcccgccacttggcccgaggccgacacaatggcgacttcgctgtcgccctggtacaggtcctggccgaggttggcggccagcttctgcaacgtatcgaggctgatatccatgcccacgacgccgagcaccttaccgttgacgatcaacgggatggaaatgctgctcatcagggtgttccggccttccacttcgatggtgtacggctcgatcacacacacccgtctttgcgcttgagggcaggcgtaccaggcgtttccgggttcgctgccgggcggcgcggtgttggcggcgatttgtgcctcgctcaacacctcctgcaccaattgccccggctggctctgcgaccaatacagcgcaaagcgcccgctgtcgttccccgccattgcgcgttgaccgcgccaatcggcatccgcgccggccagtgcatcaggcagcatgatgacgtacaggccgaggactttttcgcgctgtttcagggtttcacgggccgtagcgatcaatgcttcgcgcaattgcgcgaccgtcaggcgcccattgagtgtctgctcgcgcagttgcagaacctgttgcgcgaacccttcgccatacaaggcggtttcgttgaaaaaacgctccacctgttggccatgcgcaacggcctgggcctgcaagcgttccagcgcagcctgcccgagcaacgcgttgctctggtctttaagcagctttgcactggttttgttctggtacgcgctggcgccaatcagcgcccccaccaccgccagcaggcagagtccgctcagcagtgtgatacgccattggagggtgaggtgagctagacgcatggctgaggcttcctgcagagggctttggcggcgatgggctgggcagcgagccctggtttttatgcttgttgccggcacccgggcatagcgcgggtgatcctaggttgcggggatgacaggccaggcggctatcccaaatcggcaaggccggtgggattgcccgtgcagcgccgacctgttttggggcggggctgtggatgctaccgatttgggatagcgagcggttcgggggcgggcataggatcaaattcagcgcgtaaccaaaacaagacgctacccggtgccgatgcggtgtggtcgggccaaccctaaagcgactgcctcatacaataaggtcaataacatgagtgtatctatcccggtcaacagctccacggagctcaagcgtggcgccctgggtgtgggcttcatcatctttttcgtaatatctgcggcgagtccgttaagcgtgatcgccggcggcttcccgatcggcatcatgctgggcaacggcgcgggcaccccggcgctgctgatccttgccttgctggtgctgctggcgttctcggtgggctacaccaccatgtcccgacacctcaccaatgccggcgggttctacgcgttcaccgcccgtgggctgggtggcctggccggcggtgctgccggggtgctggcgatgtttgcgtacaacatcctgcaggtcgccctgtatggcatgttcggcggggtcgtcagtggcaccatggaagccacgttcggcctgctgttgccctggtgggcctactcgctgatggcgatggcgagcattgctatcctcggttatcgcaagatcgacctgtcggcgcgggtgctgtcggtggtggtgatcgccgagtacctggcgatcctgatcctggacttcgccatcctcaagtccggcggtgacagcggcatcaacctggattcgttcgaccgcagccatgtgttcagcggcaccccgtcaatcggcttgctgttttgcttcgccgcctttatcggttttgaagcaacgacgatctacggcgaagaggccaaggatccgcaacgcagtatcccgattgccacctactgttcggtgttgctgatcggtggtttctacgcgttgtcggtatggtcgatggtggtgggggtcgggtcggacaaaatcgtgccgatgctgcaggccttgcaggacccgaccacgtttatctatggcatgtccgaccactttgtcggcccgcacctgacccaggtcatccgcgtgctgttcatggtcagtatctatgccgggctgctcgcctttcacaacgccgccgcgcgttacttctatgccatcgggcgcgacggcttgttgcacagcgtgttgggcaccacccatcgcgtgcatcagagcccgcatatggggtcggcgttgcagagcttgattgcggcggtggtggtgctgattttcgcggcgatggacgctgacccgatcctgcaactgtttgcctggctgtccaacctcgccaccctgtgcgtgattttactgatggcgctgacctcggtggcggtgtgtgtgtacttccatcgccatcccgagcttaaggttgggatgctgcgcggacgcatcctgccggggttctcatgtctggcgctggtgctcgtgctggtgctggccgtggtgcatttcgacgtactcaccggcgccagccaactgctgtcctacagcctctgcgcgattattcctgcggcgctgattatcggcattgtgctcgcaatgcgactgcgatcgcgctcgccgcaacggttcctcgccttgggcagccacaagctttaagagcgcagcggttttatagctcgactaaccagacaattgcagcctgtcgttgctcggcatggctcgtcagcgtgtgaaaggaaggtttcaaatgcacaactacaagatgctcatcgatggggttcaagtggccggtgaacgaggccagtttgacgtggtcaacccggccaccggcgctgcatttgcacaatgcccggcaggctcgctggggcaactcgaccaggcggtgaatgccgcgcaggcggctttcaaaagctggcgccacagtagccacccagaccgttgtgaacgtttgctggcgattgccgccgatatcgagcgcgaggccgacgcgctggcccgcctgattgtgcaggagcaaggcaagccgctggagctggcgtttggcgaggtcatgggggccgcggcgtggacccgctacgcggcggctcaagacattgcggtggagctggtggaagaaacccccacccaacgcatcgagctgcaccgcaaaccgttgggcgtcgtggcgtcgatcaccccctggaactggccgttcatgatcgccgtctggcacatcatgccggcgctgcgtgccggcaactgtgtgatcagcaaaccgtcgagcctgaccccgttaagcacgttgggcctggttgaaatcattgcccgccacgtgccccgcggggtgatcaactgcgtgacgggcgagcagggcttcggcagcgcaatcaccgcgcataccggcatccagaaaattgtcttcaccggttccaccagcaccgggcaaagcgtgatgcggggggccgccagcaacctcaagcgcctgaccctggaattgggtggtaacgatgcggcaattgtattgccaggaacgccggtcgaggcagtggccgaagagatcttccaggccgcctttctcaacatgggccagacctgtgcggccctcaagcgcttgtacatccacgaatcacagtaccaggcctttgccgacgcgctgacgcagatcgcagcgcgccaggtggtgggggatggtctcgacgccggtgtcacgttcgggccggtgcagaacctggagcaactggaactggtggaggccttggtcgccgacgcacgcgccaacggcgcacgggtgctgtgtggcggggcgcgcctggatcacccgggttttttctatccccctacgctggtggcggacgtcaccgatggccatcgcctggtcgatgaggaacagttcggccctgtgttgcccttgattgcctaccgggatgtcgaagatgtgctgcagcgcgccaacgctggtgacatggggctcggtggctcggtctgggggccggatgtcgagcaggcccaggccttggccagtcgcctggagagcggcgttgcctgggtcaactgccatgcgcagatccagcccaatacgccgtttggtggcagcaaaatgtcggggtttggtgtcgagttcggccttgaagggttactggaattcacaggccagcaattgctgttcgtgcgcaagcgcgatcccgcccaaggagcttgaacatgtacgaaaaatacaagaccgccgagaaaaagttctggcaccccatggggtccagtgccccggcgcagcgcgccaaaacgctgatcatcgcccgaggtgacggcaattacattacggacatcgacggccagcgcatgctcgacggcgtgggcggcctgtggaatgtgaacattgggcacaaccgtgccagcgtcaaggcagcgattgccgcgcagttggatgaattggcgtattaccagaccttcgacggcattgcccaccctcgggtgttcgacctggcagaacggctgaccaccctgttcgcccaggaacgcatgacacgggtgctgttcagttccggtggctccgatgcggtcgaaaccgcgctgaaaatggcccgccaatactggatcgccagtggcgaaccggggcgcacgcggtttctgtcgctgcgtaacggctatcacggtgtgcatatgggcggcacatcggtgggcggtaacggtgtctaccactacaaccatgggcagctgttggccggctgccatttgctcgacaccccatggctgtatcgcaacccctgggattgccgtgatcccgaagcgctgacggcgcactgtattcggcaattggaggagcagatcgcgttgctgggcgcgcagacggttgccgcattgatcgccgagccggtgcaaggtgccggcggggtgatcgtaccgcccgccagttactggccgcgcctgcgggaggtgtgtgaccgccacggtattgtgttaatcgccgacgaagtggtcacggggttcggccgttccggctgcatgctcggcagtcgtggctggggcgtcgcgccggacatcctgtgcctggccaaaggcatcacggccgggtacatcccgctgggcgccacgctgttcaaccaacgcatcgtcgacgccatcgagaacgggcctggcttcagcagcatggtcatgcacggctacacatacagcggccacccgaccgcctgtgcggccgcgctggcggtactggacatcgtcgaagccgaggacctgccgggcaacgcggccagagtgggtgcgtacttgctggaacagctcaaaccgttgaccgagcgctacccggtgatcggcgaagtgcgtggcaagggcctgatgatcgcgctggacctggtggtcgataaggccacgcgccaccccctcgacccggctggcggccaaccctcgcggatcgccgacgaggcgcggcgtgccggtgtgctggtgcgaccgatcggcaacaagatcattctctcgccgccattgaccctcaccaccgatgaggcggacttgatcgtctctgcgctggatatcgccttcaccagctacggctagtcgccgttaaaacggtgcggcaaaggctgcacccacgtcatgccaatacttaagacagccttttgaaaggcgcacctccaggagcttgagccatgcggtatccattgcgtcgtcccgtgttcggtagcacgttcgtgtgcacattggcgctgtgcgccattcaacaggcccaggcctatgaggtgtacagcgacgacagccggcacctcaacgcggacatgaccgcggtattcggtcagttcaacagccgcaagaactacgatggcacctcgggcggctccacatggcgcgagggttatatcaaatacggcctgagcggtgaccaggccttgggcggcaatggctccgcgtatggggcattcgcgctggtcagctccgccacctggggcgacggtgatccgggcggaaacagcgtggggacagagcgtacgactaaaatcgaagacgcctacctggggtggcgctccggcgatctgtttccggcgttgggcaaggacggcgtggatatctccggcgggcgtcaggtggtcaaggtcggtcgcggcttcctgatcaacgatgacggactgaacctgggcaaaggcccggccgatggcaccatgaaccgtgggggcgcttactacctggctgcccggcatgcattcgaccaaaccgccgtgctgcgcctgggtgggcaagagggcctgcacggcagcgtgctgtggctcaagtccgacaaccgcgtccaggccgaaaccgaactggccgccggcaccctggattacaccgcgcaaccgggcacgcttgggctgacctgggtgcatggcctcgacgtgaacgatcgatgggccagcgactttcagcgccagcgcaagggcatgaatatctacagcctgcgcgcagagggcgatgcgggcgtcaagaacctcagcctggcgtttgaatacgcctggcaggacaaggacgccgggccggagaaagcctggtacggcgaagcgggctacacctttgccgataccgcctgggcacccaaggtgacctatcgctatacgcgttactcgcaaaactgggatgcgctgttcaccggcttgagcatgggctatggcacctggttccagggcgaagtggccggtaactacgccgggccgttcaacagcaatacgcgtatccatcacgtcgggctgaaggcaaccccactggaaaacctgaccctgggcgcgctgtatttcgattacgacaccgtgcgtaaaagcacggcgttgaacctcgatgcccgcgagctggatgtgtacgccgagtgggtggtcaacccgcacttgatcatcaccccgctggtggggctctacaaacccaagcaggactcgaccaccggtggcaaccaggtcggcggcaacggcaccaacctgtacagccaattgacggtggccgtgccgttctgaagggcgcgggctagggcgcgataccgctcggcgcgttatgcatgttttcggcaatgcgccgggtggtgtccatcaccatttcaatcacggtttcctggcgcagcagcttgaagctttgggtgctgccgacggccgacaggctgccgaccacttcgtcgaggtccgtctggatgatcggtgcggcgataccggtcaggcccaggttgagttcgtcgtgggtcaggcagtaaccgtccttgcggatctttttcgcggccttgctgaaaccggcccagtcatagggactgtcggggtcgctggccatgtgttcgtcgaacaggcgttgcaggcggcgacctttctgataggcgatcaaaaccttcgattgtgccccgcgaaagaacggcaacggctgcccacgcccgaacgcgaagtgataggtgtcggcgggttcggcgatgtaggtgttgatgatgcgcccgtcgtaaaacacgctggcgaacaccgccaggccggtttgcgcggacagctcgtgcatcagctcgcgcccggcgagcaggatcgggtcgtactggcgcattttccagtccagctcgatcacccgcgggcccaggccatagctgccggcatccacgcgggtcaacaggccggcatcgcacaggtccttgacgtagcggtacacggtggcccgtgacaggcccatgcgctcggcgatggtgtcggggtcgatcttcaacgtctgtgggccgaacaggtccaggacgctcagcaatttgctcaggctgctcatttcgttcctaaaaggggggcacgtgctgcattccgtgggcgcaacactaccgcagtgaaagaaaaacgcaatcttttgtgctttttagatcatcaaaaaatcacataaatctcattaaatgagacaaatcaaaataaaatgcttgttgattggatttttgtgtgtgataaatctcatcactgcaaacgctcaagcaagagggctgaaaatgaatggtgcgcaactgatagtgaatgcggcagcggcaagcggtatcgagtactgcttcgccaaccccgggaccaccgagattcccctggtggcggccatggccagcgcacccgctctcaagccggtgttgtcgctgttcgaaggggtctgcaccggcgcggccgatggctatggccggattgccggcaaaccggccatgaccctgacccacttggggcctgggttcgccaacggcatcgccaacctgcacaacgcacgccgtgccaacacccccatcgtcaacgtgatcggcgaccacgcctcctggcacgtcaactacgacccgccgctggccagtgacatccaggccctggccggcgcggtttccggctgggtgcgcacctcgcgcaccgcgtcgggggttggcgaagacctgcaggaagccatgcgcgcggcctggcaggccaaagggcagatcgccagtttgatcctgcccatggacctgcaagcccacgccgtgacccacaacggtgtgttcgccccgatccgcccgccggtgcgccgctttgccggtgaccgcatcgagagcgtggccagggccctgcgtgacggcctgcgcctggtgtttatcgtcggtgacgaaggcttgtcggtggccggcctggaagcggcggggcgcctggcgcaactgccgggcgtgcgtctgttcgccgagacctttccacgcctcagctaccgtggcggtggcctgccggacctggaccgcctgccgtacttcccggaagtggcgattgaaatcctcgaacaatacgacctggtggtgtgcgccggcgtgccggagcccatcagctacttcggctacgaaggcatcccgtcgcgcctggccgaacgtgagcgcctgctggcgttggccgatgtcggtgacgatgtcgccggcgcgctgacggcattggccgacgccctcgatgcgccggcctatataccgacgccccagggtatcgaactgccgcccggccatgccgagctgaccccacagtcggtgggccaggtgctggccgcctccctgccggacgacagcattgtctccgtggagggcggcacctgcggctatccgttcttcaccgcttcggcccgcgccgcacggcatcgggtactgaccaataccggcggcgcgattggccagggtatcccggtcggcttcggcgccgccctggccgagcgcggcaaccgtgtgtactgcctgcaatcggacggcagcgcccaatacaccattcaaaccctgtggagcattgcccgcgagcaattgccggtggtgatcctgattgccgccaaccaccgctacgcgattctgcagaacgagttgcgccgcttcggcatgaccgaactgggccctgaagccctgaagctgacggtgctcgacagcccgcgcatcgactggaaagccctggccaaaggctacggcgtaccggccagcacggtgcacaccaatgccgaactgcaacgggcgctggccaatgcgaatgccgacggcgggccttgcctgatcgaaatggcgctgtgaaggagtcgaccatgaagctgtttgaagtgttacccgccgtccaggcctttctgtcccagccgggtcgcctgtttatcggtggcagttggcaggacgccgccgatggccgccgcttcgcggtggaaaacccggccaccgaagaaaccctgaccgaagtggcccagggcggtgcgcgggatgtggacgcggccgttgccgctgcgcgctcggcgttcaacggcgcctggtcgttgcagtcaccggcccagcgcggcctgttgctgttccgcctggcggacctgttggaccagcaccgcgaagaactggcgcagctgatcaccctggagaacggcaagccgattgccgcagcgcgcggtgaagcggccagcgccgcgaccatcctgcgttactttgccggctggccgaccaagatcgaaggcagcaccttgccggtgtcaccggccagcggcgcgccgatgctcaactacaccctgcgtgaaccggtgggggtctgcgcgctgatcgtgccgtggaatttcccgctgaacatgtgcgtgtggaagctcggcccggcactggccaccggttgcgtggcagtgctcaagccggccgaacaaacgccgctggtcgcgatccgcctggtgcagttgatcgaggcggcggggttcccggccggcgtggtcaacctggtcactggcctgggcgccgaaaccggcgcgccgctggcggagcatcccgatgtggacaagatcgcctttaccggctcgacccaggtcggccggctgatcgcgcaagcggccacgcgcaacatgaaaaaggtctcgctggaactgggcggcaagtcgccgaacatcatcctgcccgacgccgatatcgtgcgcgccgccaaaggcgccgccgatggcattttctataaccagggccaggtgtgcacggccgcttcgcggttgtacgtgcacgccagcgtgctggatcaggtccttgaggaactcgaacggcacgccgccgcccacgtcctcggcaatggcctggacccggccagcagcatgggcccgctggtgtccgggcgccaactggcgacggtcaagggctacctgcaacgcggccaggaagaaggcgccgaactgatctgcggtggcgggcgtccggaacacctggagcgcggccactttattgcgcccagcgtgttcctggatcgcgccgaggcggcctgcgtggcccgcgaagaaatcttcggcccggtactgacggtgatgagctggaccgaaatcgacgacctggtcttgcgcgccaacgattcgccctacggcctcgcggccggcctgtggacccgcgacctgcgctcggcgcaccgcgtggcggcgcagctcaaggcaggctcggtgtgggtcaactgctggaacgtggtcgatgcggcctcgccattcggcggctacaagcaatccggctggggccgggaaatgggtaagaacgtgatcgatgcctacaccgagaccaaaagcgtgtttgtcgatctggcctgaactgaataatcacacgaggtaattgttatggatcttgaattgaaaggccgcgtggccattgtcaccggtggcggcatggggatcggcaaggaagtcgcacgttttctctccgaagaaggctgcaaggtggtgatctgcgcgcgccgcatggcgttcctgcaactggccgccgaagagatcagcgcccagaccggcaacgaagtgctgccgctgttctgcgacaccaatgacatgtccgccgtgtcggaaatggtcgaagccgcctacaagcacttcggccgcatcgacatcctggtcaacggtgccgctgcgccgtccggcgtcgtgcgcaacgacatcgagcacgctggcgacgatgagctgctgtcggacctcaacaccaaggtgatcggctacttccgttgcgccaaggccgtgaccccgcacatgaaggccgctggcttcggtcgcatcatcaacatcggtggcctcaccggacgcagcagcaaggtgctgtcgggcatgcgcaacctggccatcgcgcacatgaccaagaccttgtccgaccagctcggcccgtcgggcatcacggtcaacctgattcaccctggcgtggtggataccccgcatatccaggagctgtatgaccgtgaagcggtcaagcaaggcaagaccgcggaacaggtcgagcaggcctacatcgacgcgacgccgattcgccgcaccctggcaccgattgaaatgggctggttgattggtttcctggcgtcgcccaaggccggcgcggtgaccggcgagtccatcggcatcgacggcggtttgacccgtggtatctatatctgaggagtatctgtgatgagtaacggaacccttttggttgccaccgtcgggcaagcggtgatccgcagtgccgacgatggccgtacctggcatcgcctgggcctggggcaggacctggaattcgatgcaatcactcgctcactgagcctgcaccccgacgcgcccgaggtgatttacgccggtaccgacgtgggcttgtgcgtcagccgcgacaccggcggccattggcagcgcgtcgattcgccgttcaacgggcagaccgtgtggaaagtcgcggtggacccacgcaacgcacaacggattttcgtcggcaccggggcaccgtcccgcgccgtgttgtggcgcaccctggacggtgggctgagctgggatcgcgcaccggtggagattccggagttctgcgacggcgtcagtcgcccacgcctgctggcgtttgcctacgacccggtcgaccccgaccagttgtggttcggccttgaagagggtgggttgttccactcccgcgacggcggcgacagctggacccgcgtcgatgaccgcctgttgtgggagttcaactcggacgtgcacaacatcctggtgctgcccaaccatggccagaaagtcatcgtggtggtctgcgtcaacgcggtctaccgcagcctggacgaaggcctgacctggaccggcatcatcggccgcgaagccttcggcctgtattacatccgcgccatgaacgcgccgttgggcacgcaaagcgacctttacctgagcatttccgatggcacgccgggcaccaccagcaagatcctggtgtcccgcgatgcggcgctcagctgggaagtgctgccgctttcccagcagcccaattcctgtgtgtgggcgattgccttcaacccggccaacccacggcagatcgtggcgggcaccaagtacgggcacctgttcacctccgacaacggcggtgacggctggcagaaacagtggcgcgacttcagcgagatcgctgacgtgctgtggacgccggctgtggcgcagatcaaggccgggcatcaatccatcgtcaagaagcactgaggtatatcgccatgaaagtcgagatcctgcgtactcacctatcgctctgggtcgctgacccggacgtgtcggcccgctggtacgccgacatcctgggcatgcacgaaagtgcccggggcgagagctgggtcatgatggcgtttggcggcaagcaccacgacattgccttgatccgcgccgaccccggcgcccatcagggcgggctggggctgcaacactacggcctggaaatcgacggggacatgaccaccctgcgccagctctacggcatgttgctgggcaagggcgtcgaggtggtgaagatcaccgatcacgaaatcggccatggcgtgtacttcaacgaccccgacggcaaccgcatggaattcttcctcgagaccgaacacgacgatgcgcgcggcaaggcccggttcaaggccgctggcgcgccgagccgacatttcaacctggacccactggacccactttgaggcaaaccccgatgaaaaccgctaattttgcgacctatcacatccgtaaatggtacagcttcgtcgaagaaaccctggccaacgaaaccggccagctggccgatggcgagccactgttcaaatatgcaattgccgccgtgatcgccaacccttatgccggtcgctacagcgagtcgctggccgaactggtcgacccttcgccgctgctgggcgaagaatttggccggcgcatccaggcactggccggtgcccatgagattgtcagctatggcaaggcgatcctggtgggcagcgagggcgaatacgagcacgggaatgcattcctgaccaacccggccgccgatccgatccgtgttgcgctgggcggcggcaagtcctgggtaccgtccaccggcaagcgcggcgggccgggttcgaccatcgatgtaccgctggcgcacaaggatgccctgtatgtacgttcccattacgacagcatgtcgctgatgtttggcgacgggcctgcgcccgacgaggtcgtgatcatctgggcctttgccacccgtgggcgcttgcatgcacgcctgggtggcttgcaggctgaggacgtgaaagggctggatgggctgcactgaggcgcatggctttggcgacgccggattaaaaccacaacaagaagcggtgaatagcgatgaagcaggagaagacccaggttgtcattgtcggcggcgggcccaacgggatcacggccgcacactatatggggatgtacggaatcgactgcgtcgtccttgaactggctgattgcatcctgccttacccgcgtgcggtgggcatggatgatgaagccctgcgcgtgttgcagggtatcggcatcgccgagctggccgtgcgcgatatgatctgcgacgtgccgttgcgctactacaacgcacgcggtgtgtgtttcgccgaggtcaagccgagcaccgcctactacggctggccgatgcgcaatatcttcatgcagcagttgcttgaaggcaccctgcgcgaaaacctggggcagcgtacctgtgtggagttgcgccagggccatgaaatgctcgaactggagcaggacggcgagggtgtgaccctgcaggtgcgcaatgcccagggcgaggtctatgagctgcgcgccgactatgtgatcggcgccgatggcgggcgctccaccgtacgcaaaaaggtcggcgttgaattgctggggctgacccatccgcgcaaatgggtggtggtcgacaccgccaatgacaccctggatgcaccctataccgcactgcatgccgacccgcagcgcccgttcgtgtgcatctacctgccttaccagcagcggcgttgggagttcatgctgatggaaggcgaagatgaggcgaagatgtgcgaagaaagcaccatccgtgacctgatccgtgggcatatcggcgacgccgtcgaccagttgaacatcatccgcatccgcgcctacacccaccactcccgggtagcggcacgctttgtccaagggcgtgtggcgctggtgggggatgccgcacatatctcgccaccctgggccgggcagggcctcaattcaggtttgcgcgacgtggccaacgtggtctggaaactcgcggcaatcatccaggggcgtgcgtcccatgggattctcgcaagctacgaccaggagcgccgtgggcatgccaccgagctggtggccctggccgacaatatgggcaccgtattgggcttgaccaacccgttgatggccggcgtgcgcgactggttgttccaggcagtgaacagcgtcgacaacctgcgctcgcacctgctggagttcaagttcaaacccaaggccaccatcgccaaaggcctggtctatcacgaacgtgccgaactgcgtgaggacgacctggtcggccagctgtttgtgcagccctatatcgaagacgccaagggtcagcgtcggcgcctggatgacgtgttggggcattcctatgcggtgctgggttaccgggtcaacccgcgcgagcaactcagtgaaaagatggcgacattctgggcgcgctgggacacacgcttcatccaggtcaatcgttcgcgcagcggcttgggccgtcaccagccgttgacggcgatggacgccatcagcgtggaggacgtggataatcgcctcggcgaatggttctccaaggtgcgcgattgcatcgtcgtggtgcgcccggaccggtttgtcgcggccattaccacgcccgagcggctggaaagtgtgttgcgcaagttggcggagcaactgtcatgagcgctgacaaccccgtgttgaaccagttgcaccacgccacgcgcacggtgcaggccatcgcgccgctggcatctgacgcgctggacctgcactcagggtacgcgctgcaacgccaggcgctggacctgcgcctggcggcgggcgaacatctgagcggctggaagatcgccttcgccggcagcgccgcgcaaaggcgtttcggcctggaggagcccgtgtatggcggcctgactgaccgcatgcgtgtgctgccgaacacggcagtggcgctttcgcggttgatccagcccaagctggagatcgaagtggcaatcgtgctgggccgcagcctcgcaccgggtgactaccgtgatgaggagatcctggcggccattgcagaggtggcgccggcgttcgagattgccgattgccgttggcagggctggacgttcggggcgggggcttttcttgccgataacgcggcggcggggctgtattgcctcgggccgttgatggctttcgatcccattgcgcatgccaacgtcgcctatcgcctggaaagtgctggcgcgcttcgcggcgaaggcaacaccgagggccgggaggatccaccactggccaacctgtgctggctgattcgccgtctgttggctgacggccaaccggtggaggccgggcaagtggtgctgtccggtgcgctcttggcgccgatggatatccagcccgctacgtaccgcttgcatatgtttggcacggaactggctttgcttttcacggcggacaccgctcctgtgtgaacgccagctgccgtcatggatgacttgagtccccttcaggccgataacaacaacggggcacctaggaacgacgaccatgcttgctgaagttcgaaccttcaatgaccctcaattgcacgccggttccatccagggctggcggcaggtctatgaccagttgggccgtggctgcctgaccagcgagctatggcaattgtccgccgaccgctttcagatcttccaggaagtgttggacaaacgcgtggtgcagcgcggctatgcgcccaaagaccggctgtgcgcggccatgtcattgggcagtgcgcctgtggtgcagggtcagcaagtgggggcgcacagcgtcgtgctgttgcgcgatggcgaggagtttgtactgcatgcgcctgaaggtacgcacttcttcgccctcaacgtcgatacggtacgcttcgccaaactggccgccttcgagttgtccggcgatcagctcaagcgcctcaccacccgctcccaactctgtgtggatgacgcgttactgttgcgcatacgccagcggatctacccgctgtttcgtcaccttttgcaacaaaccgatgcgatcagcgcaaccgccgagaaaatgcttgaggacgaactgctcaacgcgttcctcgatttgttcagcaacgccaccgacgaggtgcgttgccgtcgcggcaattttgccgtgagtgcttacctggtcaagcgttgccaggagttgatcgatgccagtggcgataccccactgagtattctcgatctgtgtgaacacctgcgcgtcagccggcggaccctgcagaacagcttccaggcggtgaccggcatgcgtccggtggagtacctgcgaaacctgcgtctgaatgcggtgcgtcgacgcctgatcgccaccccggcctgcacccagaacgtcggcgaggtggcggtggcgatgggcttcttccacctgagccactttgcagcgcattaccgggcgctgtttggcgagtcgccgtctgaaacacgtcgagcgatggtctgagtctccggggttcaggcgacggggttgcccataccctccacaggtaagccttcctccagacagttgtccgggcgctcatgcaatcgctggttgcaccacgcgaagcctggcaccaccaccctgcacagcgccagtggcacaagacacgccaggccgacccgcggcctgatcgccacgtgggtacgtgtctctcgaagaaatcaacgagctttgatggaggaaccctggagacccggggtttatctgtgtagctcgcgatcaggcgtagctgatcctgtcggtgtaggcgttttgcagcattttgcgttggtagtcgcagggtgtggtactgaccagttttttgaagtcgcgcaggaagtgggattgatcggaaaagcccaggtccagggccagctgcgaaaacgaaacatcctgctgggtattgagggtgtccagggccgcctggcagcggatgatccggcaaaacgtcttgggtgacatgccggtgtcctgattgaactggcggtgcaaggtacggctggtatagccactgagatcttcgagttgctggatgcgaatatcgccgcgatggcgcagcgcctgctgaatgatcatggcggtgagtcccgatgtcttgcccatcaggcgtggggccaggtagtcgttgaacagccgcatctggtcgcccagcagcggtgcctggacgatgctttcgaagatgcgatgggcgaaccccgagacctccagcaggtcgagttcccgctcggtcagctcttcggccagcacattgatgaagccgggaatgacacccggtgaaaagcgcacgccgaagtagtgatggtgctgatgcaaatggacggcttgggcggtcagcggtgtgccacagatcctggcgctgggtcgagtggcatcgcagtcgaaaacgatgtccacgcagccatccggcacggccagcaggtcgctcgattgggcgacgtcgaaggcatagaaatgcgagatcgccgggtgcgcggagggcatcaccgaatagcgtgaagaattgagcacgaaccaaggctgttcgttcgcggtgtggtgccggggagtcggcacattcggtttgatcatggttgcaccttgggtaggcagcgctgcgggaaaaatcacgcattaatcgcgccaactgacgctgcgccggcctgagggcatgtccgaaatttacaataccgtcgacaacgtccgcccgatactcgacctcgacagcgtggagctgcgcctaccgcagcgatgtcaccttcagcgcgagaataactatgtctacaaatacaaaaatcgacttcatctacctctccgagcaggacatgatccgcgcgggggtgaccgacatgctggcctgcgtgaataccatggaagagatgttcggcctgctgtacgccggtgactaccgcatggccggcccgaacaacgactcccatggggcgatggtggtttttccgcaggattcgccgttcccgaatatgcccaagcccacggctgatcgacgcatgatggccatgccggcctacctgggcggcagcttttgcaccgccggcgtgaagtggtacggctccaatatcgccaaccgcgaaaagggcctgccgcgctccatcctgatgttcaccctgaatgaccccgacactggcgcgccgttggcgcatatgtcggccaacctgctgtctgcctaccgcaccggtgcgattcccggtgtaggcgcgcgccacctggcccgcaaagactcgaaagtcgtcggtctgcttggccccggtgtcatgggcaagaccacgctggcggcatttatcgcggtgtgtccgcacatcgacacactgaagatcaagggccgtggccagaagagcctcgacaattttatcgcgtgggtcacagcgacttatccgcagatcaccacgattgaggtggtcgacacccttgaggcagtcgtccgcgattcggaccttgttacttattgtagctccggtgaggtgggcgacccctcgatctacccaattgtgcgacgtgaatgggtcaagccaggcgccttcctcgcgatgccggcgtcctgctcgctcgacgcgggtatggaacagcccgacgtgcgcaaggtgctggacaacactggtctctaccaggcctggtttgaagagttacccaagcctgcgcatcacaccgtgcccgtcattggcgtgcgcttcatggacatgattgccgaaggcaagatgcagctcgatgacgtcgaggacatcggcaagatcatcgccggtgccgcgccagggcgtagaagcgatgatgaaatcatcatcatgtcggtgggcggtatgcccgtggaggacgtggcctggggcacggtgatttaccgcaacgcgatcaagcaaggcatcggtgtgaccttgaacctgtgggaaaccccggaactgcgctgagccaccccaacactttcctttgcgaggcattcgacatgacaaaaatcatcaagctcaagaccggttcgccgtttgaagatcaggccagctattcgcgcctggtggtcgtggataactggatctacgtgtccaacacggcgggccgcaacccgcagaccaagctgattccggaagacgtccttgagcagacgcaccaggtcttcgccaatatcgagtcggccctcaaggccgtcgatgcgagcctggccgatgtggtgtgttcgcgggtgttcatccaggaccccaaggacgtgcccgcggtcatgggcctgatcggcgaaaagtttcgcggcgtcgacccggcgagcaccgtcacctgtccacccctgggctcgacggtctacaaggtggagctggaagtgaccgcgtatcgcaacgcgtcgaaggcgcaggtcgaagtcattcgcctgtcgcaatgatcgtcaagcggccaggcgcaggcgtggccgcccttattcgcttaccgagtcttgaccatggcaccgacaatagcgcccgtgacaacctccaccgtatttcccagcgccacgtccgtcgtcatcattggtggcgggatcatcggcctgacggctgcgctgaccctggctgagcgcaacatcgcggtggtggtcctggaaaaaggccgtatcgccgccgagcagtcatcacgcaacctgggctgggtacgcaagaccagccgccacgccgccgacatcccgctggcgcttgcggctgaccggctgtgggcacaaatgcccgagcgggtcggggcggatgtcgggtatcgccaggaaggcattatgtttctgggccgcacacctgcgcagatggcgatgcacgaggggtggctcaagtcggtggagcatttgtcgctggattcgcggctgctcagcaagcgtgagattgacgcgatggtgccaggcggcgtgggtgattgggccggcggcatcttcaccgcgtccgacgcgcgtgccgaaccgacgctggccagcagtgcgattgccaaggcggccatggccatgggcgtggtgattatcgagcaatgcgcggtgcgcacgctgcagatgtctgccggcgcagtcagtggcgtggtcacggaaaaaggcgaaatcagctgcgaccatgtgttgctggcgggggggatgtggtcacggcgttttctgggcaacctcggtgtgtcattgccgaccttgcccttgacctgctcggtgctgcgcacccaccccatggaggggccgacgcagatcgctgtcggtgcgcctgatttttcctttcgcaagcacaaggacggcggtttcatcattacccagcgcggtaagttggacgccttcctgaccctcgatcacttgttgctcgccaagcaatatatgccgcagttccgtgcgcaacgcagcgtcttgaacgtgtcgctgggcaagccatttatcaatgacctggcactggctcggcggtggggcgccgatagcgtcagcccgttcgagcgtgtcagggtgcaggatccagccgccaacccgcggctcaataacgacgcgatgaacaacctcatggcggcctggcctgtgtttgagcaggcgcggatcgcccaggcctgggctggcactatcgacgtgacacccgattccaacccggtcatcggcccggtcgcgcagattccggggctgaccgtggccaccggcttctcggggcatggcttcggcacgtcgccagcggcgggccatctcgcggcggacctggtcagtgggcatacgccgatcattgacccaagcccttatcgcttcgatcgtttctaaaggagcatgcccatgcctgccgacagctgttttttcactaaccgtgccggcctgcgcctgcacttcttgcgctggggcgattcgagcggcgtgcccctggtgctgttgcacggcttgcgggcctatgcacagacctgggagtcgctggtgcaagccttgggcgcgggctactgcatttacgctctggatcagcgtggccgggggttgagtgactgggctgcgcccgccagctaccacactcaatcgtatgtcgaagacctcgaagatttggtcgcccacgtgggcctgcagcgatttgtgttgctcgggcactcattgggcggcgccaacgcccttgaatatgcgcggcaacacccgggccgtttgctcggtttgctgattgaagacatcggccccggctcttcaagccagggcgatggcgccgcgcgtattcgtcgcgagatgggccagacaccgttgcagttcgagagctgggaggtggcccgcgcattctggcaggctgcgcgtccgggcttgtcgcaagagggcctggcatcgaggctcgcgcattcgatgcaagagcgcgacggcgcgatcacctggcgtcacgatcagcaggggattgccgaggcgcgcctgagcatcgaaccgacggatttgtggccggcggtgcgcgcactggattgcccgagcctgttcattcgcggcgcacgctcggatttcctgccgcctgcgacactgcacgcaatgactgcctgcaatccgcaggtgcgcacggtggaggtcgccgacgccagtcactatgtgcacgacgatcaaggggcggtgttcaatgccctggtggcggagtttcttgaaagccttgcgcgcccggaatgaagcccacagcccgcatgattgcgttattggcctcgctgacggcctttgtgccgttttccattgatacctacttgcccagcctgccgcagattgccgttgagctgtcgagcagcacggcgcgagtgcaacacacgatcagcgcgttcctcgccggcttatgcctgggcatgttgttctacggcccgctgtcggaccgctatggacgtcgcgcgttattgttgggcagcctcacgctgtatggcctggcaactttggggtgcctgtttgccgcaagcatcgatcaactgatcgcctggcgctttatccaggcgctgggcggggccggcgcaatggtgctggccaggaccgtggccagggatttgttcggtctggcgcaggccgccaaagtgttgtcctggatgcaaatgctgacaatgatggcgacgttggttgcgcccatggtcggcacctggctggtgctggtcgacggttggcgcaccatattcgccgtgttgttcatcctgtgcgggttttgtctgctgatggtcggtgtggggttggacgaaagcctgccgccgctggcgcgcggccactcgctcaaggccgcctttgcggcctacccgggtattctccgccagcctcgggcggtcgcgttgatcctgtgcatgtccctcacgtttggcggcgtgttcgcctttatcaccgcctcaccctttgtgtacgtggagtacttcggtgtctcgccgcgcctgttcagtgcgctgtttggcctgaacattctgggcatcatcgtcgtgagctttatcaatgcccgctgggtcacgcgcctggggccactgcgcatgctgggcgtaggaaccgcgctggcaggcatcgccgcaatagcgttgttggtggcgggttacacccaatggggcgggctgaccagcatcgtactgtgcctgatgctgtacatgggggtgacgggcttgctgggggccaactgcacggcgagcctgatgagcatgttcccgaggcaagcgggggcgagcgtcgccctcggggtctcgatgcagtttgcctgtggggcgctggcgagtctgtgggtcagtcgcctggcggatggcaccccatggcccatgtgcctggtggtgggctgttgcgggctgggctgcctggtggcgtatgccattgcgcggcgcgcgccgttcacgcctgtggttgtgcgggatgaacagcctgtgccgtttcaaccctgaggcggcgacaagcacgcggagactgctggtaatttgcttgagcttgccagccacttggagatgcctgacagcacagggtgaatcctcgcgctaaggctctcccagattattgaacaccgtttccagcatgcggttgaggcgctggatctgggcttcggtcatgccactgaaactgcgcttgaacacgtcgccggtggcggcctggatgcgttcgatggcggcccggccctcggccgtgatgcgtacctgggtaacccgtccatcgtcctcgcagggcgcggtgtcgaccaggccatcgtccttcatgcggtacaccgttttggtgatggtcgacagcttggcgatggcgtgggtggagatctcggaaatactggattggccgttttccttgaggatgaacagcacgcgccagcgggggatatccaggccgatttttttcagggatttttccatgtattggctatagcggccatgcaccatcgccagccagtagaacggaaaatcttctttgtgaaagtcttcactgccggggtcgtagcgactggcgtgtgttttcggagacgtcatggtcagctcatgtcggaagaggcaagcaatcatagacttttctcgtgaattcggcacggttatcaccggctgaaacgcaagccatgacgtcggggcacgtgaatggatttaattgacaattcacgtaatagtcagggagtgtgaaaaaagacagccggcgtttcaggcttcgttcactgagttttacagcgaaggaaaacgtgacatgaccatcgtgattgaacagctttctcttggcggcaacgggtttagcgtgatggtgaaagacaccatcgatgtcgccggcagggtgactcgggcgtcgagtcaggcgcttgatgacgcggcacccgccgacacccatgccgatgtggtgcaggccctgttggacaagggctgtcacttggtgggcaagaccagtctgcatgaactggcgttcggcaccaccggtatcaaccattggacgggtacggcgccgaacccgcgttttcctgggcgtatccctggggggtcttccagcggttcggcagcggccgtggccgctgggttggcggactttaccctcggcaccgataccggtggttcggtgcgtgtcccggcgtgttgttgtggggtgttcggcttcaaaccgacgttcggccgtgtcagccgtcgaggcgtgatgcctgcgcaaagcagtctcgattgtgtcgggccatttgcggccagcctgccgatgctgatcaaggccatgcaggtcattgaccccaccttccatccggtgcctctgcagcagccaccacggctcggcatcctggcggtccaggcaagtgctgcggtgcaacgtgtgatcgatgccgccgtggcagacagtggtttgccgactcaacccgtgaccctgccgagcctcgatgcggcctatgctgccggcatggtggtcatcaatcgtgaaacgttcgacgcctgtgggcacttgttggcgaccggtctggtgggggccgatatcgccagtcgcctggccgctgccggcaccaccacggcacagggcctggtgcatgccgaagaggtgcgcgaacagttcacggccgaagtcgacgcggcgttgcgtcaagtcgacgtactggcgttgccgaccatgccggatttcccgttgaggctcgccgatgccgccgacacgcaagccgtcctgggcatgacccggttggtgcggcccttcaatctgagcgggcacccggcgttgagcattcccctgggcagcgccgagggcctgccggttgggttgcaactggtgggggtgaaaggcgcggacgaacaactgctggctatcgccggccacctgctcgaatgcctgtattccaaccataagggctgatcggctcaggaggtgaacatgcatgaaccacacgctttggcaacgcttgaaagacgcttgcgccggttcgaaacccaagacagcgtgcgtgcctgcatgaaccgctacatggtgttgtgtgacgggttggatgcgcactcgccgttgccagagttggccggcctgttcacccaggacgcggtgtgggagggcaagggcgccaaatacgccaagagtttcggcggctatcgcgggcgtgaggccattgccgcgatgttctcgggctacatgaagtcacccgcgcactttgccctcaatgtgcattttctgaccagtgagctgatcgaggtgcacgatgatcacgtcatgggcagttgggtgatgttgcagacgtcgacatttgccagtggcgcctcccacctcaatgccgctcggctgacggtacggtttgccttggaggagggcgtgtggcgcatggcgcacttccagaccgaaaacctgttcgggcgccctgtgcaggcctggaacagcgaagacgacctgccggtgccccaggctggcgtcgaatgatcgccttgcatcgctgacaccgctcacgtccttttgtcattacccgcccccggtctgccgggggcgtggcgttgccgtgcgcgcagtttatggttggtctattaattttgtgaaaaaaaatattttttccaaagacttctggtttctttatggagagatcagatgctaacaagtccttatataacaataatttgaaaaattaattgagtgtcatttttggaatttaaggcgttttaagcaaaaatattgcgtgaatattcaattgactcttcacgtaaatccgcgcagatttatggcaacggcacccacaaaaataaaggtaaccctatgccgatctatcccgtttgccttgcttgcgtagcgccccttcgcgtcgaaggcacatccgccgcgcccagactccccctccgagatgcccggtttttccggcactgaatcctgcccaagcccataccgttcctgacgacggagtaactatatgcatgcgctaattgcctcagcgaccggggtcgcgagttcgcttgtcggaggtgccgatttcgaggtgttgcttgacgacattcgtgagcgtgcccgatccggtgagttcgaccgccagcggcacatctcacgggacgtgatcgagtccttcaagcagcacggcgtgtaccgggccctggtgcccaaacgctttggcgggctggaatgctcacccgccgaattctgccgggtcatcgaacgtatctcccaggccgatgggtccgccggttgggtcgcgagcttcggcatgagcccggtctacctcgcggcgttacccctcgagagcattgcccaggtgtacgccgatggccctgacctggtctttgccggcggtatcttcccgccgcagccggccgaagtggttgccggtggcttcatggtcaacggtcgctggaagtactccagtgggtcgctgggggcagatattgtcggcgtcggtatcgcacccaaagacggcgataccttcggtttgccgcgtattgccgtgatgccgcgcagcgccattcgcatcgaagaaacctgggataccgtcggcctgttgggaacgggcagtcatgacctggtggccgagcatgtgcgggtcgccgaagagtggaccttcgtgcgcggtggcctgcccaatctcgatgagccgttttttcgttacccgtcactgtcattcgccacccaagtgctctcggtggtcggcctgggtgttgcccgcgccgccctggatgcattgacggacatggcctgcggccgcgtatcggtcaccggcgcgccggcgattgccgatcggccactggctcaagtcgatatcgcccgggcggaagccgacctgcgggcagcccgtgcattcttctacgaatccatcgagcgcgcctgggagtacgtgctggcgggcgatgcagtgccggtggcagccaccaatctgctgcgcctgtcttccacccacgccacacgcgtggccgccgatgttgcccgtaccgcgcaaatgctctcgggcatgagtggtgtgttcaacgacagcccgttggcccgctgcgtcaacgatgcccaggtcgtgacccagcacgccttcatgggcgacatcacctatcagaacgccggagccatgttcttcggtaaacaacccttgcctggctacctctaaccgtcgagaccctgaaaatgaacgataaaaaaatgctccgcgtgctgttctgcatggggatcaaccagaatttcttcgatgcgcctcgtgacgagcaattgcaggtctgggcagccttcagcgcgatgtggaacggcattcacgacctggcgggcgtgcaggtgctcggcaatatggacgacgaccagagcatggtcggcccctccgacggttttccctggaccacttacctgctggccgatgtgccggacatcgataccgtacatgccgcctgcaacctgttccgtagcacgccggtcggcgatggcccgtacaaattgtggcgctacaccaaagtcgaagcccgggttgggcgcgagctgatcatccagcgcacttgatgccgaggaggccatcccatgaacaagctgattcctgccgtgaaccttgccgtcgatcctgccgacctggtgcagtccgatcgcgtgcacacctcgatgtacaccgatgcccagttgttcgacgccgagcttgaaaagattttctacagcacctggatctgggtcgcccatgaaagcgagatccccgacagcggtagctataaaaccacctacatcggcaagcagccggtgattgtggtgcgtgatcgcaagaaagacacccatgtgctgctcaatcgctgccgtcatcgtggcgccaccgtgtgtgaacacaaaaaaggcaagaccaacagtttcgtctgcccgtatcacggttgggggtatgcattggacggctcgctgcgcggcatcccgcatccggaaagctacgccgattgcatcgacaaggccgagctgccgctggtcagcctgcgtaccgaaagctacgccggtatgatcttcgccaccttcaaggatgacatccagccgctggaagactacctcggcgcggcgaagaaatggatggacctgttcatgaagcagggcgcgggatacgggatcaaggtccccggcgaacatcgcttccgttttccgggcaactggaagatccagctggaaaacaccaccgacgcctatcacttcccgctggtgcacaagagcttcctgtcgtcggtggacgagcagaccctggcgttgttcgacttcgtcaaaggccctggttatgtcgaggacttgggcaacgggcacagtgtgatggtgatgattccggacctgatcgacctggaagccgacctggacaatcccatccccgagcgctttgaagcactggccgcggagctgcgtgatgaaggcatcgaggagctgcaggtgcgccgcattgtgcgtgcggtgggcggcaccggtttcaacctcaatctgtttccgaacgtggcctgttcgatggcgtttttccgggtgttgcaaccgctctcggtgaccgagaccgagattcaccactcggtcatcaccatggacggcggcccggccgccgccaaccgctaccgcctgcgcctgcatgagcactttcaaggaccgatggggtttggcacgccggacgattccgaagcctgggagcgtgtgcagaagggcgcaagcgccggcgatgagctgtggatcatgctcaaccgcggcctgcccggcgagcgtgccagtgccgacggccgggtgtccgacgtaagtgccgaaacgggcatgcgcgcggcgtaccaacagtggaaaaagatgatgtcggcctgagccgtggagaaccttatgaatctgcaagtgctgcaagaagtcaccgccttcatctggcaggagggcgacatgctcgaccatggcgagtacgccgcctggttgaagatgtgggcgcccaagggcacctacatcatcccgatcaacccgacggaaaccgacttcgagaacacgctcaactatgcgtacgacgaccaccatatgcgtgagttgcgggtaaaacgcctgatcggtggcgagtcgatctccaccagcccgcagccgcgtacggtgcgcacgcaatcgcgctttcgggtgctgagtgacgacggggtgaacgtgacggtgcgctgcgcacagaacgtgcgtgagttccgcaaggagagcctgaaactctacagcgccgacctgacctacgagttggtgcgggctggaggtggctttgagattcaccgcaaagtggtgagccttatcaacagtgacgatgccctcgccggtatcggctacatcctttgaggcgcgccgacatgaaccagatcgcattggtgactggggcaggccagggcctgggccagcgtttttgcgccagcctgctgcgggccggctattcggtggtcattaccgatatcgagcaggcggccgcagaggcttgccaggcgcaattggaccccggtggcgcgcgcagcctggccctgcccttggacgccggccgcaaggatgacttcgagcgtgccctggccagtgtgctggaacgcttcggtgcgctgcatgtggtggtcaacaacgctgcggtgaccaagaccacgccgttgatgcaaatcagccccgaggagtttgacgccgtggtgggcctgaacctgcgcagcgtattcctggggtgccaggtgctgggcggacacatggctgacgccggttacggacgactcatcaacatggcgtccctggcagggcagaacggcggcaccgcgacgggcgcgcattacgccgccagcaagggcgcgatcatcacgctgaccaaggtattcgccaaagagtttgcctcgcgcggggtgacagtcaacgccatcgcgcctggccccatcgactccgccgccgtgcatgcggctgtgccgcctgagcgcctgccgggcctgctggcaaatatcccggtgcagcgtctgggcgatgcggattttctgggtgacctgatcgtgcagttggcgcggcccgaagcctatttcaccaccggggccacctgggacgtgaatggcggcctgttcatgcgctgactattaccgggtcgccacggcgaccttcacgaactccatggaatcatggccatgactgaacaactgttggatgtagtcgtgcacaagcgcgagctgcaaggggacggcgttgtcgtcctggatttgacccgtcgtgacggtgcaccgctgccgttgttcgaagccggtgcacatgtcgacattcacataaagccgggcctggtgcgccagtactcgctgtgcagcgaccccgccgatcagagcgtctatcggctgggcgtgctcaaggacccagcctctcgcggcgggtcgctcggtgtgcacgatacgttgcaggaaggttgcgagttgcagatcagcgcaccacgcaatctgtttccgctggccggcgatgcgcggcgctcgatcctgctgggcggcggtatcggcatcacgccgatgattgccatggcttacacgctgcaggcatccggtcacgccttcgaactgcattactgcgggcgtgagcgcggccgcagtgcgtttttggcagagctggcggattcgccgtttgccgccaaggtgttcacccatttcgatgatgaagggcttgaacagcggctggacctggcccacgtgttggggtcgggcgaggccggggtgcacctctacacctgcgggcccgctggcttcatggagtgggtgatgcaaggtgcgcgtgagcagggttataccgaggagcacatccacaaggagtatttccaggtagaggtggacagttccggcgccagctttgaagtggtggccgcgcgtagcggcaagaccgtccaggtggcagaagggcaaagcatcctcgccgcactggcgcaagtggggatcaagatcgagatttcctgcgagcagggcgtgtgtggaacctgcctgtgcgatgtgcttgaaggtgagccggaccatcgcgacgtctacctcacggatgacgagaaagccggcaatgaccaaatcctggtgtgttgctctcgcgccaaatcaaaaagactcgtgctggatatctaaggggaacgacatggtagacgtaagcagttttcgtaatgcaatggccatgctcggcggcgccgtgacggtcatcaccaccgatggcgtggcgggtcggtttgggttcaccgcgtcagcggtgtgcagcgtgaccgactcaccgcccacgctgttggtatgcatgaaccgatcgtcccattccaacgagcacttcaagcgcaatggcgcggtgtgcgtcaacattctgtgtggtgatcatcaagaaatgtccggggcattcgcgaaccgtgcgttgacgatggatgaacgctttgccgtgacacagtggaccaccctggaaagcggcgcgccggtgatgaccgatgcgctggtcaatttcgactgccgtattgcccaggtccatgaagtcggatcccacagcattttctactgtgaggtccagaccatccgtcagggaaatgccgacgaggggctggtgtatttcaaccgtgcttatcaccgcctgggcgaggcgtccaaagcctgctgagcccggcccgttgcgccggctgccgatagcgtgccggtgtgtggcgatatgagcacattgtgtttttcaaggtatgcggcgtgtttctagaatgtcgccttagttgtttcgtgaaagcgctgaagtgcttccgtgccgtcggtcgccagtgcaagaacgggcagggttagagcaaaggcgatcattaaatgcgagggcagtttcatactgtttacccacgttgcgcgcacaacaaggcgctaaattaaattcagttgaaatgtaggtcagggctgattcgggaatatagggtatcggtacgggaatcaaccgttgtcataggttgtactcgcactttttgacctgtgttcagccgatgttcagcgttgttaagcttgaataaacaagttgcacggcctttacaactcttcacttttccaatctggatcgcctgaaaagcaaagtgctagtctgcgcttttttagagacggcagggacgcatgaataagctaacggaagtggctgtaaaaaagccctgttcatttatttttgtcgttgcgtttattgtattggctgtcctgcaatacaagcccgccgtgctcaattacaccacgcgctttgtcgactttgcccaatacatgcttgcgcacggcgtcacgctgtttccaatcgctgaagatctgcagccttatcccgattacaccgtgatcaatacactcctggtgtatctggtgtccctgccgtttggccgtgtgtccattctgtcgatgggcgtgcctttttgcgtcgctgccgccctgatgttggtgttcatatacaagttgggtgcgttgcatgagaagaaatggggcgcctacgcggtggtgtttgcactgttcacctggtcatttctagacggcgtgaactccctggcgctggatgtgtacccggcacttttcacggtgatgtgcttttacctggcctacgcgggcgaggtgcataaacagcgttatcggttgctgctggtgctcgccggcctggcactgggctttgcgtttcgtggcccgatcggcctgatcggacctgccagtgtggttgcctcttattacctgttgagccggcagtggcgcatgctggtggtgttctcgttgttggctggcgtggtcctggccacgggtatcgcgctgctgacttgggcggcctacgtgcagggcggcgatgcttttctgcaagaggtgttgatcatgcaaggactggggcggttcggcagtgatcacgcgccccgttattacttctacttttcggcaggcttgctgacctacggtgtcaccgcaatcattgcggtgagtgtgatcatcaagcagggcaaacactttttcgaccgaacgccgcatcccgtcacgagcatgctcctgtacctcaccggttggctcctagtgatcattgtgctgttcacgattccaagttcaaaaaaggcgcgttacatactgtcgatcaccccggctatttcgttgttggcggcctacgtcttcgtggatcgcagtgaagtgtttgcaaacacccggagaaaactgcttgggttctgcttggagttgccgctgataggcctcgtgatgctgttacttgcctatgggtacagcttgtatgcggtgaccccgctgcagcccaactacctcggcgcctgcctgggtttgattacgcttgtggccgtgcggccctggttggaatcacgctttcacgagcatccccatcgtgagttcgtcgtcttttctttcggggctgtcacctttctcatactggatatgtttttcttcaactccgttacttaccatctggagttggcccatgagccgacgcctaaattcctgccttattggttctggtgaacagtgagtctgcaaaaaaaacacgcggtgtttgcaggtgcaggcatctgcgcgatgctgctgggattggcggtgttcgtcctgcaaaacctgtccgatatggagttgacggacgctcgggtttcgacgctgacgtttcgctctggcgacgcacagttggtcgggacgctggtcttgccattgcatgtccaggcgccgcccgtggcgctgatcattcatggggatggtcccatggaccgcttcgcagcccacggctacttcccgctgatcaacagtttgctcgacgctggaatcggcgtgtttacctgggacaaacaggggatcggcgagagcacaggccattggctcagccagtcgatggcggaccgtgccacggaagcggtggccgcgctcgcccaggtgcgcaagcaggagggggttgcaccggacaaggtcgggtttctgggtttttcccaaggcggctgggtcattccgcgtgccgccagtggaggcgacccaggcttttcagtgattatcggcggggccgtgagctggcgccggcaaggcatgtactacacgcaggtacgattggccgaggaaggccgttcccaggatgagatcgacgccatcgtcaaagagcaatacgagaggaacgacaaggttttcggcacagcgaatcaagcctacagcccccacctgtttcccggtatggaccgcgctcatttcaacttcgtccagaaaaactacaacgaagacgttactgccgcagtgaaaaccatgaagggcccggtgctggcggtctggggcgaccaggacctgaatgtcaatacggccgaggactcaagcgtctaccggaagatgtttgctggcacccggggtaggcacgttgtggtcatccccaacgccacccacagtttgttgagggccggcctgttcaatgatcaattggtatcgcaatggccggcatggaaagagtacgcgttcatggcactggggcgtcacgcctatgtgccgggttccctggaactgataagtcgctgggtcaagtcctcaacgtcggggaagtgaatcgctctgcgctttaaacatcggcaaccgcttgagcatccacgtcaacagttcctgggcgggcgccgccaatggtcttgaggccttcaccaacagcttggcctccacccccagcaacagcggatggtcgatcagcaccgacgccagctcgccgttttcaatttcccggtaggccgcgaactccccggccagcgaggcaaagccgccagtcgcgaccaggcgcttgagtgccgccagggagttgctgaccagggtcgggcgtacttcgatcttctcggcgtactccagcagggtgatggcatggccgataccaaacgtggtcggcgtcagcaccaatgggcattccaatacctcggtcaccgtcgccatggtgcctcgcaccgccagcggatggtccgggcgcaccagcaacatcaccggctgcagcgaggcggcgcggtagtcgatgtgtggatggggcggcgggttgtaggccaggccgatatgcgcgcggttttcggcaacttcgttgagcacatcgtccaccggcaggatgtccagggtgatttcaagcctggggtattgcttgctgaaaggcgcgagcacgttgtcgaccagcgcatccacataaccttcgctgatcaccacccgcacatggccttgttgcaggcccttgatcgcttgcaattggtcttcgagtttttcctggtgcgagcgatagccgcgccagaactccagcagatgcgccgccgcctcggtgggctgaacgccacgggcctggcgctcgaacagcttggcgcccagttcttcttccaacagcttgatctggcgggtgatcaccgagggcgaggtgttgatgctgtctgccgcccccctgatcgaaccgtgcaccagcacttcgtggaagtagcgaagacgttgttgattgatctcacgcatgaaggatgatccgccttggaagttgtgttgtctacaaagcaacgctaagtgaacttagttgctcttgctgccgatggtgggccggcgcaccctgaattggcaagcacgcagacccacaaaaacaattggagactcgtatgccaacctcccgggcgccggcagaacattcagccatttctgccctctaccacaagctcaactggcggctgctgccgctgttgttcatcggctatgtctttgcgtacctggaccgcatcaacgtggggtttgccaagctgcagatgcaaagtgacctgggcttgtccgatgccgcctacggcgccggcgcggggattttcttcattggctatgtgctgttcgaactgcccagcaccctgatgctgccccgcatcggggcgcgtaaaaccttcagccgaatccttgtgctgtggggtatcacctcggcgtgcatgttgttcgtgcgcgatgtaccgacgttctatgcgatgcgttttttgctcggcgtgttcgaggccgggtttgccccaggcatgatctattacctgtcgcgctggtacggcccgaaccgcatggcgcgggcgattgccattgtgtttatcgccggccccatgggcggcattctgggcggacccttgtcggcctggctgatcaccacgcttgccggtgtcggcggtctggccggctggcaatggatgtttttgattgaaggcttgccctgtgtattgctcggcgtgctcatgtactgcgtgctgtccgaccggcccgccgatgcgccttggctgaatgaggcggaaaagcaactgttggaaaccgaactgggcacggcgaatgcgcgcagccattcattccgtgcggtactgcgcgaccctaagctgtatgtcctggcctcggcatacttctgcatcatcttctcgatctacgccatgagtttctggctgccggcgatcatcaagaccctgggcctgcaagacacccagcaagtgggctggtatgccgccatgccctatgtcggggcggcactgggcatgtactggatcgggcgccgctcggaccgcctgggcgagcgccggctgcactgtgccgtcccggcggccatcggcgcgcttttgctgatgctctaccccttggcgggtggccacctggtggggtcgatgaccttactgacgctgtcgatcagcatgatgttcatggcctacaccgtgttgtgggcgatgccctccgagcacatcaagggcgatgcggccgcaggcggcattgccttgatcaacaccatcgggctgtccggtggtttctggggcccggccatgatcggctgggccaaaaccgccaccggcagcttgaacacgggggtcgtagccgtgggctgcgtgttcctgtgcgcggcgttcgtgatcattgcgaccaaaccgcgaacgcgcaccggcgcggcgggcgagtacagcgcgggttgagtggcccgccatcattgaaaaccatgaggaacccaagatgcttctatacctgtcgacatgggccgagatcggccactttctcgagcgcagccgcaccatcgtcatccccatcggctccaacgaacagcacgggccgaccgggctgctcggcaccgactggatgtgccccgagatcattgcgtgccaggcgcaaaaaaacgccgatatcctgatcgcgccgaccttcaacatcggcatggcccagcaccatatcggcttccccggtacgatctcattgcggccctcgacgttcattgccgcgatcagcgattgggtgcattcgctggcagcccatggttttgaaaagatcctgtttctcaatggccatggcggcaacgtcgcctccattgaagcggcgttttccgagctgtatgccgaagccagctttgcccgtcgccctgcggggttcgccctgaagttatgcaactggtgggacctcgacggggtgggcgaactggccaaggagcagttccccaccggccacggtatccatgccacgccgtccgaaatcgccgtgacccaatgggcctacccggactcgatcaaaaccgccgattactcaccccagatcgcgccgtgggggccgattcgcgaagccttcgacttccgcgcccgccacatcgatgggcgcatgggctcggacccggcgcaggcctccccggagaaagggcgagacctggtgatgatggcggcacagggcctgatacgcgaagtcgaggcgttcaacggcgagccgatcccgggctaagagccagccctttcaaggcctttaggtagaacaggcggtaataccctgtggcgagcgggcttgtcccgcgttgggctgcgaagcagccctgaaacccccggccgaagagtgcctgattcaccgcattcctccatctagggtcgcttcgcaacccaacgcgggacaagcccgctcgccacagttgcagtgtccgcccttattggtatggtatcagccagattgggtcggtttttcaaagaccttgaaagggctggggctaagagcactttcacgccaatccgggcgctgagccgtcaacgctcatgtttagcgcgtggtggtgccaggaagccccagtgcgctcagcttttcacgtacgtgaatcagcttttcctggttcgtacggatgaacgctgagcgctcatcaacggcggctacgatcttttcaaacgtcttgagctgtggcgcaaagaagtcgagcagtttttcgtcatcgccgatcaggtcgtagatgtccttgaaggaactcttgatgaccgtggtaatggactctttggcggttttgagttcctgttcgagttcgtgagccttgtaggcactcaggaggtctgaggtcagggtgaaggctgcaccggcaggaccggcccatttggaaatggccccggcgattttggttgcctgccacggcttgaatttgatgacgacgccggttaccgagcccagcacatcgcgcgcggcaaacactgcacccttgatgatgtccgggctcaggttggcgatgcctttcgccgcgccgcccatggacttgagtgcgccttcgctcatggcattgaggaagctctcacttgagtcgagctgacgcccgatgtcctgggaaatgcggctggtgaccttggacgattgatcgaacgaccggtcgatggcgctcttgatcctcaggttgagcttatagccgacaccttcttcggtgtagccgatttcgtcctcgagaaagtcacggatgttctccagtgacaaagggcggagcttgcccagcaattcgttttcgatatttcgcagctcctcgaacaactccccggcaagacgtttgacgtcgcggcggcccttggaaatgtcctgtttgatccgttcggactcctcggcgttctgttgtgcgaacgcatccagtctgcccaattgctcttcagcctgggccacatgctggccgacgacatcgcggaccacgtccatgccggtcttggccatcaggaccgcgggtacgttgtcctgcagaatgcgagtggtcatggctttcaggtcgttgatccgcgagcggctttcataatgctcgggtttgctgaaccagaattccaggccgcggccaccggggttagaggccaggcagacgatattcaaacgtgccagttcttccgaggtcaggttagcggcccgctgcagcttggctttcaagttgtcttttttgatggcggcttgatcgtcgaacagcgcctgttcggtcaagtcagtcacttcatccattttattgatgacgaagaccgtcgaagacagtttgttcaagtcgcgcagtacccacttggcgatagcactgtggctatccttgagcggattggtggcgtccacgacgtacaagatcagatgcgcttcggagatgtaacgcttggtcaggtcttcataaaccacctgttggccatcgacagtcttttccttgtcgccaaagaggcctggggtatcgacgatctcgcatttgccgggcaggccttctggcgtgtaaatcgccaggcgatcggaggactcgtccatgtcgatcttcatgtcggccatgattttacccagccatgcagcgatcacgctggtcttgccgtcggagaaggcgcccagcagcgcaatacgtagaacgtcggactcgatcgcgttgacagcggaatcaatcttttccatttcggcattaacgtcggcgcctagctcgcccagctctttcaggatgaaccgaagctgatccagtcctttgatcgctgcctgtttatcaacattaaattgcgtgaattgttccatggggcattttctccagttgatctttagtgcgctgcatcagggccatctgctgcttgatgatgtgcagcgggcgaatcagggatgcatggatgtcgctgacttgtccgaggaccttctcttcgatttggctgcgaatcggtgcgagcaactccttgagttcatcacgcagggagtccacagccttggcgcgtgcctctgcgatcttttcctggacttgagcctgggctttgcggatgcgtttttcctcgctgagaaggaaattcatgaggttgatcaaaaagcccactgcggcgccgacggccgcgccaatcaggttgccgacaacaggaaacgcggtgccgatacctgctcctgcaagggcataagaaccaacgttgaacagcatccagccatagtctttaagatccaggccaaggcccagttcgggtgtcttgtagctggcattgaggtcttctgctacataagccacggcctgctcgaattcaacccgcgaaacatcctcgagcaagcgctgcatggcctgcacaaggtcaccctggagctctgccaggtacttttcgaactgggtctgcaagtcgtctttcagttgctcctgacgctcgcggaaggcgcgctggatcttggtggaaatcaaatcgttgttgccaaaatgttcctcaacgatgttgtcggcgcgggcactcaaatcgatgaagagtccgttccacaggttttttcggccatcctgcaaaaggcgttcgaacctgaccagcccatctttgatagccgcgcggcattttttgaattccggctctgtccgggcgatgaacatttcgtgctgcgtgtggagcgcttgcaggatggcgaggttttccaccagcaattcatgcactttggtcttgttgctttcgatcatgtcttctttgaacgtgcccagttttccgtgaagcacgcgggcgactgatttgatctggctgaactcatacatggctttcgacgaggcgaaatacttgcggtaattgcgctggtgaatgaccaggtcccgatcccgggacgggtggatgctcgtgcgttcggtccctggtgcaatggccagggatgaaaaggcgagcaagccctgcacgcaatgtccgggctgcatggccttggcgcccagcgcggactcaagtacaccgatggtttgctgcaatgcctttgtcgagtcgccatcgctttccagagacgcaggaacgccgtcgaattcgaattggtcagcgttaccgcgcacgttcaccaggggacacacttgggtgccgaggcgcaaataggcgcgaatcttctctgcagtggctttctcaggcttcttgttggtgccattgacgtagaacaccaggtgcgctttggctactgcttcgcggaccatatgagcgtactttccttcgtcaccctcaatgccgggcacatcgatcaactgaaagcgtttgcccttgtagttgagggtgtagaacgtattgcccttggtgaagtcctcttcgcctgtaccaatgatgcgaccgtctgtgcgcgaggccagcgcctttttccggctaaggaccaaggtcccggaatacacgctggccagccgctggttcaacacctcatccagggtggccgaggcggtcttgatgtgagtgaaggggcttgcgatggtcccctcattcgacagggtggtcgcttcatcgaacagttcgtcgagctcgaaattgctcatttcacgctcctgccagtttcaagagcgctgccgatgccgcagcccccagaaccagtccgccgcaggtaaaaacaatcaacttcgtcctgattctggcgttggattgttcatgggccagttgcagtcgttgcgccgcctcttcctgctgggccttcagctgttgggcggctattgcctgttcggcttcaagctgttgcgcggcggctgcttgctcattctttaatcgggcattggcctcttgctgcgcgagggcggttcgggccatggcctcggactcagcgatgcggtttctggacagggcctcttcctgcaaaatctcggaaagatgacgcgtcccctggcggatttcagtgatttgcgctgcatactccgcgtaaaccgcattcagcccttcgcgcaatccatcgatgtgttcagccagcgcctgttcatacttcaccaagtcgtgggcgttatgttccagcagcgcttgccgggactcttctttgaacagaatgcgcaatgattcgatgatcgtgctcttgcccgcattggtttcgccgaaaaacgccagggtgaacacgtcccactcggcatgggttttcaactggtcgagttcaccatcgaaacgaacctggatggcgcgaagcttctcggtcatgttgccaacttcgcgcttgccctctttgtgctcgacattcagttccagaatatcggccatggcgctggcgatactgtctgaaacgtcggagtacaggcggttaaggtcttggggcgcgttcattacagttccttgtgtgctggcgtctaagggatgaaggtgtaacgtcaggaggtgatgtgccgagtgtcacgcgagcccacggtgggaggggtgctgctcgttggtctggcacatgggtgaatcgcaggcagccgccatggccggttcagtccagcggcaatgaaacggtattaggcgtataggaggagtgcgtcgcgagatcggctcaaaaacagccgtggaataagttgcctgaggcattcacaacatccttgttggtgtgggacttcatgcttgcaaagcatgctccatagcactacatcggccctgcggatgaaagctttagtaggacagcctaaattgaaaccttgcgcgggacgcaaggcgacctttagtgtttgccatcaatcccatttttggaccaggcaaggaagtcagcatgacgcaattggcggctcagacagtctcatcggcgtgcgcagcattggttgaactggatacgcttcaaatacgatcctccgctggcaacctgagcccggctcaacacgcgtttgctgactatctggcgaacctctggtcaggtgctccaggtgctttcgagcatcgttatccgatcaccaggagtcgggtgtggaagccatggcggcaacaccctcagcgccagagcaacgactggtggtgtttgtccctggccgaggcagccaggcactactcctggccggaaaaaaaagcacctgatgacttcgccagtattgcagcgcgatttcgcaaggcgctcgttgagaaccagtgcgttgatgcgcgcgcggcctgcctggaaatattcaaatggggaggcgttggcaataggcccggtaatgcgtccgtgcggtgggtgcagacgcaggctgccgagaggactctgtgctgctctatccttcgtgcgatcgcactgcttggccctacgaacaaccagtcactggcggttttcgacggcacgaaactgctgatgaattccgcgatgaccaagatctacgctgctgcggctcctgagggcatcatcatctacgatggccgggtgggggccgcgctggggttgttggtgcgaaaatggctggatgggacagaggaatgtaaggttccgcaggatcttgcttttcgctggggccccaggcagaaaacggccaataacacagtcgaaacacgtgacccttcgcgagggagcttcacatttgacgatctttacaaaaaaagccgcgcagggcagccacatcaatccgaggtgtgggccgagcttgtgcgaaccacaagccgcatcctgtgtgaggtgattcggatactcaaggtacaggggcaggatacgacgctcctcagtctcgagcgtgcattgttcatggtgggttttgatgtgcgtcaatcgtcaaggctactcaaatagccgaacagattcgccgcctccggtgacagccgcgccggatccgccacgccgacatataaggtccgcgccacccattccccctccagcggtatcgcccgcagtttcgcttgcagcagttcgggatgcaccgaccccaacggcaggataccaatccccaatcccgcctcgatcatccggcagatcccatcaaagctgctgacctggatacgcaccttcaagcgcttgccggtgccggcggcggcatcgttgatgcgccgcagcagcgagctgccctggttcaaggcgacgtagtcaaagtcgagggtatcggccagggacacgcttgagcactgcgccagcgcatgcgtctgcggcaccagcaccaccaggcggtcgcgtcggtaggggcgcacgtgcaagccgggtgcgggcacgttgtcggcaaaaatgccgatctcggcctcgccgttttccacggcgtgaatcgtacggtcgctcagggcttcttccagttcgatacgcacgtgggggttggccgccagaaaggccgccaagtctgccggcaggaactggatcaccgccgaggtattggcaaacagccgcacatggccacgtacacccttggcgtaatcgtcggcgtcatgggccatctgctgggcgacgtcgagcattgtgcgcgcatgctcggccaggcctcgaccggccggcgtgagttgcaagccgcgggggacgcggttgaacagggtgcaatgggtcacccgttcgagttcggccaggcgcttgctcgcggcggaaacggtcatgtgcgcgccgttggccgcctgggtgaggttttgcgtgttggcggccagcaccagcaggcgcagcgacaccaggtccagttgcagcaggttgatcatatttacgccctgggtttccaatctggaaagagtagtggaaatctttgaaattctcacgacctgtctttggcgcgattatccgggcatcgcctccaacaacaacggacaacgtcatgagcctacccctggaaggcatcaaggtggtcgaaatgggccaactgattgccggacccttcgccgccaagatcctcgccgagttcggcgccgaagtgatcaagatcgaaccgccaatcaccggtgaccccctgcgcaaatggcgcctgctgcacgacggcacgtcggtgtggtgggccgcccagtcgcgcaacaagcaatcggtcaccctcgacctgcgccagggcgaagcccgtgaagtggtcatgcggctggtcaaggacgccgacatcctgatcgagaacttccgccccggcacccttgaaaaatggggcctgggctgggatgcactgtcggcgatcaaccccggcctggtcatgctgcgggtctccggctacggccagaccgggccgtatcgcgacctgccgggctttggggtgatcggcgaggccatgggcggtttgcgccatctttccggcgagccggggcgtacgccggtgcgcgtcggggtgtcgatcggcgactcgctgtccgccttgcacggggtgatcggtgtgctgcttgccctgcgccatcgcgagcagcagcacggcgccggccagcaggtggatgtggccttgtacgagtcggtgttcaacctgatggaaagcctgattcctgaatattcggtgttcggcacggtgcgcgaaccggccggcagcagcttgcccggcatcgcgccgaccaacgcctaccgttgcaaggatggaaagtatgcgttgatcgccggcaatggcgacagcatctaccgacgcttgatggagaagatcgaacgcctggacctggccgacgacccggaactggcgcaaaacgatggccgcgtacgccatgtggcccgcatcgacgcggcgatttccacctggacggccgagcgcaacctcgatgcggtactcgccgcgctgaaggacgccaacatcccctccggcaagatctacgacgccgccgacattgccgccgacccccattaccaggcgcgcgacatgctgctcgccagccagctggacgacggcaccgccgtcaccttgcccggcattgtccccaagctgaccgccacacctggccgcgtgcagtcgcgcgcgccgagcctggggcagcacaccgatgcggtgctcgacggcatcggtatcgacgcaccgacccgcgccgcctggcgcgctcgcggcctgatctgaaccaaggagcccttcaatgaaacgcctgtacctgcaggaagtcgccacccgtgacggcttccagaacgaaaagagctttatcgacaccgagcagaaaatcgccctgatcgatgcgctgagccagtgcggctacgccaaaatcgaagtgacctcgttcacctcgcccaaggccatccccgccttgcgcgatgccgaggcggtgatggccgggatccagcgccaaagcggcgtggaatacacggtgctggtgcccaacgtgcgtggtgccgaacgggcgctgggctgtggcatcgacgaggccaatctggtgatgtcggtgagcgagccgcacaaccgttccaacctgcgcatgacccgcgaacagtcgttcgcccagctcagggaagtggtgggggtgatcgggcgtgggccggtggcggtcaatgtgtcgctgtccacggtgtttggttgcccgatgcagggggatgtgccggtcgacgaggtgctggcgtggatcgggcggttcgccgagctgggtgtgcgcggcgtcacgctgtgcgacaccaccgggatggcctatccgacgcaggtggagaatttgtcacggcaggtgcgcgagcgctttcccgagctgcaactgaccctgcatttccataacacccggggcatggcgctggccaatacgttgggggcgttgcaggccgggatcgaccgcttcgacgcgtcgcttggcggcctcggcggctgcccttatgcccccggcgcgagcggcaatgtgtgcatggaagacctggtgcacatgctccacctgatgggctatgacaccggcctgcacctggaccgcgtactggcggcgtccgcccgcttgccggggctgatcggccatgccacccccggccagatcctaaaggccggcaagcgcctggacctgcatcccattcctgcacacgtgcacagcctcagccaacaggtagcccaccatgattgatcatctcgaccacctggtcctcaccacgattgaccttgccgcctgcacagacttctacacccgcgtcatgggcctgcgcctggagacctttggcaatggccgcatcgctttccgtttcggcaaccagaaaatcaatgtgcacgagcgcgggcatgagttcgagcccaaggcccacctgccggtgccgggcgcgctggacctgtgctttatcgccagtgtctcgctggacgcggtggtcagccatttgaacacccaggcctggccgatcatcgagggcccggtgctgcgtaccggtgcgaccgggccgattcgctcggtgtatgtgcgtgacccggacctgaacctcatcgaaatctccgagcaggtgcctgcatgaatatcgtgtttctcgacggcgcgagcctgccgtcagcgttgccgcgcccggctcaagccagcgcctggaccgcgcgcgaaaccacccgccccgagcaagtgcttgaagccctggccgacgccgacgtggcgatcaccaacaaggtgcgcatcgaccgtgcgaccctggcgcaattgccgcgcttgcaactgatctgcgtggcggccaccggctacgactgcgtggacatcgccgcctgccgcgatcagggcgtgacggtgtgcaacgtgccggcgtacagcgcggtcagtgtggccgaatcggttattggcgccttgtttgcgctgcgccgccacctgctggcgtaccgcgcggcgtcggccagccagtggccgcagtcgtcgcatttttgcgtgcacggcgcgccgatccaggacctgcaaggctcgaccctgggcatcgtcgggcgcggtgatatcggcagccgcgtggcgcgcctggccaaggccctcgacatcaccgtgctgttcgccgaacaccgtggcgcgccgcaggtgagggcgggctacaccgccttcaacgaggtgttggccaggtccgatgcgctgaccttgcattgcccgctcacgccccacacgcgctacctgatcggcgccgccgagatcgcccggatgaagcccggcgcgttgctgatcaacaccgcacgcggtgcgctggtggatgaaaacgccgtgctcgatgggctcgccagtggtcaattgggcggcgcggcgctggatgtgctgcacgtggagccgccgcaggccgaccactcgttgctgcattgcgagcatcccaatctgctggtcacgccccacgtcgcctgggccagccaaagcagcgtcgcacgcctcaaggccgtgctggccgccaacatcgaggcattcgcggcacaccgaccgaccaacgtggtgacctgaacgccccagcgacttccttcctgaaacctataggcagagccatgacaaaaataatcagctcgtccgtcgactccgtgaatcaggcgccggcacggcgcacaccgctgtaccagcacctgtatgtgcaagtgctggcggccattgtgctgggggggatcctcggccacttcagcccgggcctgggcgaacagatgaagcccttgggcgacaccttcatcaagctgatcaagatgctgatcgcgccgatcatcttctgcacggtggtcagcggtatcgccggcatgcaggacctcaagcgcatcggccgcatcggcttcaagtcgctggtctactttgaagtactgaccaccatcgccctggtggtcggcctgatcggcgtcaacctgttcaagccgggcgccggcatgcacatcgacccggccagcctcgacgttgcggccatcgccggctacaccaaggcggcccacgaccagagcgtggtcggcttcctcacccacatcgtgcccagcaccgtgttcggtgcgtttaccgacggcgacatcctccatgtgttgttcatctcggtgctgtttgcctttggcctgcaactgctgggcgacactggcaagccgttgctcaacaccatcgacctagtggccaaggcgttcttccggatgctcaagatcgtcatgtacctggcgccgctgggcgcgttcggcggcatggcgttcaccgtgggcaaatacggcgtacagtccctgggcgcctacgtgaacctgctgctgtgctactacgccaccgggctggtattcgtgttcgtggtgctcaacctggtggcgcggctggccggtttcagcctttggaagttcctcaagtacatccgtgaagaactggtgctggtgctgggtacgtcgtcctccgaatcggccttgccgcgcctgatgggcaagctggaaaagctcggctgcgagaagtccactgtcggcctggtggtgccgtccggttactgcttcaacctcgacggcagctgcatcaacatgacggtgctggcgatcttcattgcccaggcgctggacattgacgtgtcgctgtatcaccaggtgaccctgctgttgattctgctgctgacttccaaaggcgcggcgagcgtgacgggtggtgcgtttattaccctggccgccacccttggctcgatcgatgtgatcccggcggcgggcctggtgctgttgttgggcgtgtaccggtttatctcggagggtggcgcgctgatcaacgtgatcggcaacggcgttgccacgctgttcattgcgcgctgggatggggcgttggatcgcgagcagctcaagcgtgaattggggtagggcgcaggctgggaaatgtacgccgctgtacactcgctgtgcaccacgcagcgtggggtgtagagtggccggcaattcccaggcaaaggtgacccccggatggcgcaatcggcaaaaccgcgaggcaagaaccaggacacgggctggcgaggctcggtcgatgtgtggctggacgccgcctacgcggcgttgaaagagtcgggcatcgacgccgtgcgcgtgatgccgctggccaagcagttgggcttgtcgcgtaccagtttctattggttcttcgaggaccgcgagcaactgctcgccgccttgctggcccgttggcgcgacaagaacaccggcaacctggtgcaccagtgcgagcgttacgccgaaagcatttgcgaggcgattctcaacgtctttgaatgctggctgaaccctgagctgttcgactcgcagttcgaatttgccgtgcgcagttgggcgatgcagtcggcggaggtctcggcggaaatcgcgctggccgatgacacccgtatcaacgccctgaccggcatgttccggcgctttggctacgatgacgaggccgccgatgtgcgcgcgcggaccatctacctcacgcagatcggctacatctcgatgaacaccagcgaggacgtggtggtgcgcttccggcgtattccccagtacgtcagcgtgttcaccggcaagcccttgaagcggcgcgaactggaccgcttcttcggggcgtttggctacgccgagaccgcaccgggggagtttgagctgctttagaggtccttgaccaaccgcaacgcgtcgtagatcgccgcatgggtgttgcgtgcggccaccgcatcgccgatgcggaacagttggaagcgaccctcggggttggtcaccaggtgctgcgcgttgccggcgatcaagtcatgctgctcgaccgcgccgccgttgctggaatgcccacgcaggtcgaagtacaggtcatccagcggcagggtgccgtggttgaccaccacctggtccaccacccgctgcttgtgcaccgcgccgtagtcactgccgaaagtgaccagcagccgaccgtcgcgttgctccaccatctcgacccgataggtcacggtaaaggttacgtccaggtcctgcaggctgcgcatgtagggcaccaggttcatggccatgacttccggcgcgaacgagcggtccggggtgacgatttcgacgctggcaccgctctgcgcaatcacctcggccgcttgcagggcggcgtggtcaccggcgtcgtcgaagatcagcacatggcgccccggcttgacgtcgccggaaatgatgtcccaggtcgacaccaccagctcattgccctgggccagcacctcggtatgcggcaggccgccggtcgccacgatcaccacatccggctccagcgccagcacggcctcggcctcggcccaggtgttgaagtggaacttgacacccaggcgttcgcactggctcatgcgccagtcgatgatgccgatcatttcgcggcgccgctcgctcagggcggtcaggcggatctgcccaccgggccggtccgccgcttccagcaccgtgacgtcatgcccgcgctcgccggcgacccgcgccgcttccagcccggcaggtcccgtgccgataatcagcactttgcgccgcaccgccgccttggggatgtgatggggcatgctggtttcgcgaccggtggcggggttgtggatgcaataggcggcaccgccctggtagatgcggtccaggcagtaattggcgccgacgcagggccgaatgtcttcttcacgccgttcgatgatcttgcgcacgatatgcgggtcggtcatatgggcgcgggtcatgccgaccatgtccaccttgcccgaggcgatggcgtagcgcgccgtggcaacgtcggggattttcgccgcatggaaggtggggaacccggtagacgcgcgaatctcgccggcaaaatccaggtgcggcgagttgcgcatgccctggatcgggatcacatcggtgaggcccgcgtccgtgtcgatatgcccgcgcaccacattgaggaagtccaccaggccgctgtccttgagcatgtgcgacacctgcaacccttcgcaggcgccgaacccgcccggcagcgcctcgtcgccggtgtagcgcacgccgagcaggaagtcttcaccgacccgctggcgaatgccgcgcaggatgtcgaaggtaaagcgcatgcggttttccagcgagccgccgtacgggccatccagatcgttggtgagcggcgaccagaactggtccatcaaatgcccgtaggcttgcagctccaggccatccaacccggcggcctgcatgcgctcggccgcgtcgacgtagtctttgatgattcgctcgatgtcccagtcttccagcttcttcgggaaggaacggtgcgaggcctcgcgccggtgtgaaggcgacaccactggcagccagtcggccttgtcccagcgtgtgcggcggcccaggtgtgtcagctggatcatcaccgccgcgccgtgttcgtggcactcgtccgtcagatccttcagccagccgaccacttcatccttgtacgccagcacgttgttgaacaccggcgggctgtcccgcgacaccgctgcggagcctgcggtcatggtcaaggccacaccggccttggcgcgttcgacgtggtaggcgcggtacagcgcctgcggcatgccgtccaccgggtaggccggttcgtgggccgtggtcatgatccggttgcgcagtgtcaggtgcttgatcttgtagggctgcagcaggggatcgctggacatcagagtgtgctccgtcgtgggcatcatcaggcttggcgatttgaaattagggtaaatgtacaggtgtgtcaataatgctcgacatgcatgtacattttaagtgcgacctgctgatgttctgcaaacgatgcaggcacgtgagagcacggtgggcaaggcggtggcggcgtattacgcggcgaacaaggcacggtccgaggggatgttcaggttgtggtttacgggctttttgtggtgagcggggcaagcccgctcaccacaaaaagccggcaagccacaacaacccgcaaaccacagcgtcaggcgtatgaactgccatgggctgctctcaacaaatcgcgcacggcatcggtgcgcagcagcagggtcatctgcgcctcgtcgatcacgatttccgcgatgatcaacgcgcagatcagcggcgcggtcacgaaccaatggcaccagcattgggttgccagcgaaacggctacgccgatgatccacagcgccaatacccacttgggcgcgcgctgttgcagcggcacccacaaccgctgcagccgtttcagccgggcagtgtgcagtttcaacgactcttcaaggagtgataaggacgaattcatttctcacgctcgctgagctatccgggcgtggctgggaaagggattgcccagccacgacaagttgatgcattcaacttcgatccagtgcccgtttccaggcagtgctgcacagcttttgaatgcaacgcacataccctcggtgtccaataggacaaagcatcgatagcaccgggttgttctgaacatcatggaaaagatgcgcatggtggggcctggtttacttaaagattccaactgagttcaaacagcgttccgccgttttccattttccggcacgtcaccgcaccgccgtgggcgagggcaatcgcgcgcaccaccgccaggcccaggccgctgccaccctgggcgcgggaccgcgagttttcgccgcgctggaaggcatcgaacaggtgcatggccaggtcctcatcgatcccggggccatcgtcgcgcaccctcaggtagtgcatgccatcgcgcgtgctcaggtgcacgttgacgttgccgggcgtggcgtgccgacgcacgttgtcgagcagggccagcagcgcctggcggattcgagcggggtcgcagcgcagggtgcggcgttgcaggtccagttgcagggtaaaaccggcggcgaccaggctcggttcgaacagccgcacatcctcttcaatgccggccgccaggtcggcgtcttgcacgttgagttcgaggtagccgctgtcgcccaggcccaccacccgcaggtcctcgatcatccgcgccaatccttcgacctgaccgagcaggctgtagaactgcgccgtgtccggttcgaatacgccctcggccaagccttgcaggcggccgcgcaggatggtcagcggcgtgcgcagttcatgggcaatcgccgcattccagaatgcctgctcctgggccatgcgcttcaggcgctgggccatgctgttgaagtcatccaccaggatcgccgcctcaccgatggactggtcaccggcgacggcttgcacgtcgaggtcgccatccgccagtttgcgcaggttttcggccaccgagttgagcggcatcaggatccgccgcgacagccgcgtggccacgaaggcacccaccgccaggctgacgcaggtggtcaaggccatccacgcccactcgacattggccggcagccaggcatcggcctgctcgtccgagagcggccagtaggtccataacagcgcataaaacacgtaggagccgatcacggccagggcgatcacgcagagcaccaccgccgacatggccgcaatgatctggcggctcaagccattgagcttcttcacacgccactcccgaaccggtagcccacgccgcgaatgctcgccggcacgccttgcagccccaggtcttcgatcttgcggcgcaacttgctgatatggctgtcgaccgtacgttccaggctgtcgctttccggtgagcacaacgccaacaattccgcgcggctgaacacgcgtttgggggccctagccaattgggcgagcagtttgaattcggtgacggtcagcagcagcggcaacaccttgccctcgatattcagcgtgacctgatggctttcgatatcgatttcaaacccgtccacccgcaacacattggcaccggcggcatatttgtagtcgatggagcgtcgcagcacggcctgggtacgcgccaccacctcggccgggttgaacggcttgacgatatagtcgtcggcaccgatgcgcagccccatcagcttgtccatgtcctggtcctgggcagtcagcatgatcaccggcgtattgccgcgatggcgcacttcggccaggaccttccagccatccacatgcggcatcagcacgtccagcagcatcaggtccggcttgagggtctggtgcagttcgagggcgcgccggccatcgagggcgtgcgcggtacgaaagccactgcgcttgagataggcgatcaggatgtcggcgatctcgggctcgtcttcggcgatcaggatcagcgcctgggcgtctcggacgctgttcggacggggcgtcgatgtaaaggggaaatcggtcatagtctgctcggtgaataaaccttgtcgtggttgccgctccatggccacgcttgcaagtgttgatcatagcttctgggtgagggcgcccaacatctggttggcggtggaaatcactttggagttcatctcataggcccgttgcgtggtgatcatgttgaccatctcttcaacggtgctcacgttggaggtctccagggaccgttgcagggtggtgccgaagccattgagccccggcgtaccgacctgtggcgcgccgctggaggcggtctccaggaacaggttgttgccgattgcctgcaagcccgcagggttgatgaagtcggcggtctgcaggttgccgatcacttgcgcagcggggttgccggccacggtgatcgacaccgtgccatcctggcccacggtgaaggtcttggcgttgtccggcaccacgacggccggttccagcgcaaagccactggccgtgaccacctggccattggcattcaggtgaaaggtgccgtcgcgggtatagccggtggtgccgtccggctgcagcacctggaaaaaaccgcgcccgttcaccgccaggtccagcggttgcccggtggtctgcaggctgccggcgctgaagtttttctgggtgccgacgatctgcacccccgtgcccagttgcaaccccgacggcaacgcactgttctgtgtcgactgcgcacccggctggcgcttgatctggtagagcaagtcctggaactcggcgcgatcacgtttgaacccggtggtcgagacgttcgccaggttgttggaaatcgtcgtcagctgcgtgtcctgggccgacaagccggtttttgcaacgtacagggctggaatcatgccgttctccgtgtgaacccggtcgaccgggcactctgatgaaacctattgtgcgcaacgaacgtgcgcattcaggggaggttttgtggaggaatgatggagagcggcattttttgttggccctgatcacttcaatccgggttcgatcaggccggcgacgccacgtccgatgacctccgggtagctgtgttcggcatccaggttggtcagcaccaccaccgtcaaccggtcgtcgaggtagcgcgcgatggacgaggtaaagccttgccaggagccgccgtgctcgaccacggggtggccgttgatcgtgcggatttcccagccgaacccgtagccttgcgcccgctgtttgccggcgtaggggtagggcgtccacatccgttgcagcgaggcgtgtgtcagcagggtttcatcgtagagggcgcggtcccagcgctccaggtcgcggacagtgaaatagagcgtaccgtcagccgtggcattgaaggtcggcgacacccattcctgattcctcagctcaccgtcgacccgctcgtagcccgccgcccggttgggcactatctcaaggtccgagatgacccgtgatgagcgcatgcccagcggtgtgaagatgcgctgctggagaaactcaccatagggctgcccgctgacacgctggatcaggatgccgagcagcacgaaattggtgttttcgtaggcccagttctgcccggccttgaagtccagcggcagcttggtgatcgccttggccagctgcgcttcgctgaagtcgcggcgtatatccaatgggccgccgggcttttgcagcgctggcgtgtcgtaggccgacaagccggacgtgtgggacaacagatgggcgaccgtgatcggcgcccaactcgccggtgcctcggggaagtacgtgcggatgctgtcgtccaggccgaccttgccttgctccaccagcatcatgaccgccgttgcggtaaaggatttacccaccgagccggattgcaacacgctgtcggcgctcatgggcacgttgagttccacattcgccaggccatagcccttggcgagcacggcctggccgtttcggtagatacccagggccaggcctggcaactgctgccgggttatttctgcgttgacatagcggtcgatggccgagcgctgttcgtccgtgagcggcgtggctatcgccaggggcgcggacatcagcaggacactcgccgcaagggttcggaacatgggcacctctgaagcgtttttgcggtttcaggaggtgccagtgtgcgcgaggggggtggatgtttgcgggaggtttgatggagggtgcatgtagtcgatagggccagcactcactgggggggggatgaatttcacctacctgttggatgtttatcgaacgtgtgggcaagtgatcatctcgacagagtggatttagcctttgatttggtcggttggcgtgcctagtactcgatgcaactctccagcgagtgcgatcaactgctgttccagcgcttcgacttcgcaaaggctgattccctccttgatgacttgcagggttttggcttttctcgtcggtgcgggtccgaggttatgcgcgtcttgggaaaccaacacttggcgcagtaggttgttgatcacggtttgataaccggtacctgcattttccgctcgctcgcgggcggctgcaatcaccgcatcatccagcatgatagtgattcgggttttgcctttgttgctggcgactgcaccgcgcttgccggagctgaagtcgtattcgtctttcatggttcaagcctccaagtactggcgccgttcatttttggatgcgcgcctggcactgataatccgtacaaaatttggatcgcggtaggtgtaggccactaccaatacgcgtccctttgcgtccgtacccatgattatccaacgctcttcgtcgtgatcattgtcttgtatggttagagcggtctcgtcgtaaaacaccggttctgcatcggcaaggctcacgcccttgtgcttttgctgattagtgatgctttttgctttgtcgtattgaatcctgaaagttctcattatgcatattttatatgtatataaaagcaattggacaaagcgacagtcagggcattggttcagcgtctgcgggtcccgatttgggtacgcacatccctacctatcagtgagggatcgattttgaggagggtgcccgcgtatgtccgtgcgtaaccggtgatccgttaagtagtcagattccgattccatagccagataaggtcttatgtcgatatcagaccaacccccgccgtttccaggctattttcgcgccggtcagcccgcgtaaggtgactcatcattcaaaaatgatgatcgcctgaccctccagtcagtcctcacgccgatcaccgagaacaacaaaaacaatgaatagcctccattccagcgactcgaacggccagttggcgcaaggcttcaagccgcgccatgtcaccatgctttccattgcggggattatcggcgcggggttgtttgtcgggtccgggcatgcgattgcggcggcggggccggcggtgctgctggcctatctgttttccggcctgctggtggtgctggtcatgcgcatgctgggggagatggcggtggccaacccggacaccggttcattctcgacctacgccgaccaggccatcggccgctgggccggcttcaccatcggctggctgtactggtggttctgggtgctggtgattcccatcgaggccctggccgccgggcatatcctcaaccagtggttcccgcagatcgacgcttggctgtttgccttgttgtcgatctttttgttggtggtcaccaacctgttcagtgtgtccaagtacggcgaattcgagttctggttcgccatggccaaggtgatcgcgatcatcgcttttatcggcgtgggcttcgcggtgctgatgggctgggtgccggagcgtgaggccagtgggcttggccagttgatgcaggaccatggcgggtttgcgcccaacgggctgtcggcggtggtcggcgcctttatcaccatcatgttcagttttatcggcaccgaagcggtcaccatcgcggcggccgagtccagtaacccggcgcagaacatcgcccgggctacgcgctcggtgatgtggcgcatcggggtgttctacctgttgtcgatcttcgtggtgatctccgtggtgccatgggatgacccgttgctggcctcggtcggctcttatcagcgtgcgttggagttgatgaacattccccacgccaagctgctggtggacgtggtggtgctgatcgccgtggccagttgcatgaactcttccatttacatcgcctcgcgcatgctgttttccctcggcaagcggggagatgcccccgcgctgatgaacaagacctcggcggcgagtgtgcccagggcggcggtgatcgccagcaccatcctgggcgcgggcgtgaccctgctcagttacttcatgccggccgggctgttccagttcctgctggccagctcgggggccatcgcgttgctggtgtacctggtgatcgcggtttcgcagttgcgcatgcgcaagatcctgcgccagcgcaaggtcacggtgagcttccagatgtggctgtttccgtggctgacctggctggtcatcgcgttcatttgcgcggccttgacggtgatgctggtcacgcccgaacatcgtttcgaagtctcttcgaccctcgtgctgtccctgataatttccttgatcggcttgctcacggcgcggcacccggaacccacgcaaaaaccagtggccgcagtttcgcaatcatgagtggccgcccggtcagcagtatcgttttcctgctgctggaccagttcaccctgatgtcgctggcggcggcggtggagccgttgcgcatggccaaccagctctcgggccaggagctttacacgtggcacacggctagcccggacggcaacccggtgtgggccagtgacggtgtgccgatcacgcctgacggttcgatcctcagtgtgccctccgccgacattgtgttggtgtgtggcggcatcggcattcagggcaccgtgaccggcgaactggtcaagtggctgcgcggccaggcgcgttacgccaagcgactggggggcatttgcacgggcagctttgtgttggcgcgggccggcttgctcgacggctatgaatgcagcgtgcattgggagtggttggcggcgatgcaggaggcctttccacgggtgacggtcagttccagcctgttcagcctcgaccgcgaccggctcaccagttcaggcggcacggcgcccctggacatgatgctgcacctgatcggccgtgatcacgggcatgaactgtcggcggcgatctcggacatgtttgtctacgagcgcatccgcaacgagcaggaccaccagcgcgtacccctcaagcacatgctcggcacccagcagcccaagctgcaggaagtcgtggcattgatggaagccaacctggaagaaccgatcaacctggatgaactggcggcgtatgtcgcgctgtcgcgtcgccagctcgagcgcatgttccagaagtacctgcactgttcgccctcgcgctactaccttcgcttgcggctgatccgcgcgcggcagttgctcaagcagacaccgatttcaatcgtcgaattggccgtgctctgcggctttgtgtccacgccgcatttctccaagtgctatcgcgagtacttcggcgtgccgcccagtgacgagcgttccgtcacggacagcgagcggtccatcgtgctcaagccggcgttgcacacattgccggcgcccgcgccaatgaatgtattggagcaggcgcggggcgaggcaacgtttgccagtgtgaaaaacctgaagccctgaactcagcgcatatgcaagatgatcgggctgctgctcgccgggtcggtgtgcccgcgcaacttgctcaccgccttcacatccaccgcgccgccgttgttaccccaggtgccgcgcacatagctgagcacctcggcgatttgcgggtcggtcagttgctcacggaacgccggcatgcgataggcgtccggcacgccagccgtcaccacgcgttgcgagccgttgagggtgatgttgatggctgaggcgctttccttggccagggccgaggtggcgccggccaggggtggcatccattcgggctggcccttgccgtcaaggccgtggcacgaggcgcagcgggtcgcgtaggtgtgggcgccgggggtgtccgggttggcggcgaccgcctgatactgccagggagtgccgtcgcgctgtgggtcgccgggcagtgacttgaggtagcgggcgatggcggccaggtcgtcgtcctgcatgaactgcgtggagttgttgaaggcttcggtcatcgaaccgtagaccaccgcatgggcattgcgcccggtcttgaggaactgcacgatctgcgcctcgtcccagcggcccagtccggtgttggggtcctggcgcaggctgggtgcataccagccgtcgagcagggcgccggcaaggaacggcgcgccggcctcatccagtgctttctcgttgaaggccaggccgcgtggcgtgtggcaactgccgcaatggccggggccttggacgatataagcgccacggttccacagcgcgtcctggttgggtttggccgcgtacggcgcggtcggtgcgaacacgccgttccacagtgcgatgggccagcgcaggttgagcggccacggaatatcactggggatattcggctggttggccggttgcacgccctgcatgaagaacgcgtacagcgctttcatgtcgtcgtcgctgagcttgacgtaggacgggtagggcatcgccgggtacaaccgtcggccacccggtgccacgccgtggcgcaccgcgcggtcgaagtcggccaggctgtaggtgccgatcccggtggttttgtccggggtgatgttggtggcatggatcgcccccaacggcgtggccatttccaggccaccggcaaacggcgccttgcccggcaggctgtggcaggccacgcagtcgctgacacgcgcgacatattcaccgcggctgaccagagccggctcgaaggtggcgttggccggtgtttgtgcaaacggtgtagcggtctcacgggtgacgtaccaggccagcaggcctgcggcgaccaggcagggcagcgccagccagcctgcggttcttgcgaatcgacggttgttcatgggcatttcctgaaagtcagctgaaggtgtgtcggctcaagggcaggctgcgaacacgctggccggtcaattgcgccactgcattcgccacggctggtgccacggcgggcaacggtggctcgccgataccgcccatcttttcgccactctcgacgatccgcacatgcacccgcgccatctgcgccggcgccaggatcggatacaggtcgtagttgcgcgcccgtggcttgccgtccacgtacaccgcttcttccagcaaggtctgagacaagcccagcgccaccgcgccattcacctgcgcctcgacaatcgccgggttgacgatgctgcccgggtcaatggcctgccagatgtcgtgcacccttaccttgccattctcgatggacacctcggcgatcgccgccgtgtgcgaaccgaacggcgatgccatggccacgccgcgtgcgcgccggctgccgtcttcagcggtgaaggggccacgcttccagccgccggacagttcaaccgcggcgttcagcagggtggtcagccgtgggttgtcgcgcagcaggtgcaggcgcagttcatagggatcctgtttgcccttgtccgccagttcgtcgaggaacgattcatagaaaaagtcattcagcgaattgcccaccgaacgccagtagccgagcatgggcgcgcctttgacgtagatctgcgcgatgcgtttgttggggatggcgtaggacttgcccgacaatccttcgaccgccgtggggtcgatcttgtcgccctgtttgccggcgagggcttcggtcgggccttcggtggcgcttaccgcttcgatggccaccggcaggcctttgtcatccagtgcggcgcggaacttgaccacggccaccgggcgcaatacatcgcgcaggaactcttcctcacgactccagatcagcttgaccggacggcccaccgccttggcgagcgcgatggcctgcgggtaggggttggccgactcatataggaaatgccggccgaaaaagccgccgagcaacggcgagtgcaggttgatcttcgctgcgtccaggccggtgcgcttggcgatgtcggtgcggaacatgtccggcgcctggttgggcagccagatatccaggctgccgtccgggttgaagcgggccagggcggagggcggctccaactggccgtggttgaggtactggttgtgatacgtcgcttcgacctgggtcttggcgcctttcagcgcggcggccacgtcgccttctttctcatcgtcacgggccggcccttgctgggcggcgaggaactcgaaatgcttgtcgctggagaagtccgccggcatcacgcgcagcgtcgagtcggcggccgcttcctgccagtcgacctggaccgcttccaccgcacgcttggcgtgccaccagcgttcagccaccaccgccaccgcaccgggcagtacgtgcactgaatgcacgcctttcatgccttcgacctgtgtctggttacgcaggctgcccacggtcatgcccaggcgtggcgcatgctggacggcggcgtgaagcatatcgtcgactttcaggtcgatgctgtagagcgccttgccagtggatttgtcgtaggcgtcgaggcgcttgaccggcttgccgatccagcggaactggctcggatcgcgcagggtgatgctggcgggatcgggcacgggcatgtcgagggcgctactggccagttcgccgtagcccagcgagcggcccgatgctgcgtgcacgactcgaccaggctgggtggtcagttcgcccaccggcacgccgaattgtttggcgccggcctgcagcaacatcgcgcgggcgagggcgccgaggcggcgcatggtcgggtagctcatgcgcaccgacatgctgccgccggtgatgcgcaggccgttctccatcaccacataggtttcgccgggcggcgcggcctcgacgatgaaagtggcggggtcggcatccagttcttcgccgacaatctgcgccatggcggtgtgggtgccttgcccgccttccatgaaggggctgagcaggcgcaccgtgccgtccgggcgaatctccagaaacgccggcacctgggtaccgcgttcagcggcagtggcggcttgcacccggcccgagcccagtggcaggccgaaaccaatgaccagcgcgcccacggcggtgctcgccagaaagcggcggcgtgacaggttgaccggtgcatcgagcagttcgttgaggatgttcattacgcgccctcctgcttggccagggcatcgacggccgcatggatggcgttgtacgtgccgcagcggcacaggttgatcatggccgcgtcgatctgcgccttgctcggtgcgggggtgtgcttgagcagcgccgtggccgccatcacctgcccggactggcagtagccgcattgcgccacctgttgctcgacccaggtcgcgaccacacgcttgcccacctcgtcgtcttcaatcgcttcgatggtggtgatttcccgcccgaccaccccggccaccggcgtgacgcaggagcgcaccacattgccgtccaccagcaccgaacaggcgccgcactgggccaggccgcagccgtacttggtgccggtcaggcccaggtcatcgcggatcacccacagcaatggggtgtccgcgtcggcatcgacctgataggccttttggttgattcgtaattccatggctcacctgctgatcatcggtaggtgcggcctgttttaggtgtgaacgcagtggccgcttattgtcgaactctagaccagcgcgcaagggctatctatccgttaatcgataagtcggaggatcaggcaagtattcaagagaaatgggccagtctggtgttatcgaggcggcgattgatccaggtcaatgcaaggtcggatcggcgggcatgaatgggcagggcgggcgtagagcgggttgtagcggtgatatcatggcgccactattctggcgcggtgcgttactgcgacccatggaaatgaggctttaggcaaatgctcaagaatgcaccactgcgtctgaaactgttgttgatcctgctactgcccatgctcgggttcctgacgttggccggcgtgttcgtggtggacaactacaagacgctgcgcgacatggacgcgaccgtgacggccagcgccaccgcgcagaagctgagccgactcattaccacgctacaacgtgagcgcggcgccagcggggttttcctgggcagtggcggccagtcgatgggcgacaggatgttgcagatgcgccaggactccagcgcggcggtcgaggtggtacgcggtttgacggcatcgggtggtgcgagcctggatggcgtgctgcgtgccttggaccaactgccggcaacccgtgggcaaatcgacaaactgagcctcaatagcaccgagtccggcgcgcgttacaccgagatcatccaagccctggtcgggtatacccattccctggaagccagcgtcaacaacgcgaccctggtctatgccctcggcgccttgaaccaattcatcgaaatgaaagaacgcgccggacgcgagcgtgtggtgttggggctggtattcaaccaggaccactttgatgcgacgctgctgtcgcgcttcagccgcaacctgggtgagttcaatgcctactacgatgcgttccgccgcaaggcaccggtagtcacgcttcaacaattcgatgagcacatgcaaaaccccgccgccgtggaagttggcaggttgcaacgcctggcgtttgaagtgccgatggggcaggcgctgggcatcaggccagaggcgtggtttgaaacctccacccgccgcatcgacctgatgagccaagtggaagaagccctgggccaaagtgtcagcgacctggcgaagcatgagcgcgatgccgccagtcgtgccctgtggttgaccattggcgcggtggttgtggccctgttggcggtcgtggtgttgtcctggctgatcatccgcatgatcggttcggcggtgcgcgacctgaaccgggtactgaacgacctggcgcagcgcgatctcacggcacgggcgacgtaccagagccgggacgaattcggccagatctcacacaacctcaaccgcatggcgcaagagatcagtggcgtcgtgcaggaaatcggcaacgccaccgcccaagtggcgacggcggcggaggagtcctccacggtcacgatccagaccagccagagcgtcgagcagcagcgccagagcaccgagctggtagcgacggcgatcaaccagatgagcgccaccgtgcgcgaagtggcgcacagcaccaacgatgcggcgcagatgtcgcagcgggtcaataccagcaccgcacaagggcgtgccgaaatagaaagcaccatcgcgctgatccgtcagctctcggggcaggccgaggaaaccgcgctgatcattggtgatctgaaacaggaaagcgacggcatttccaccgtgcttgacgttattcgcggcattgccgagcaaaccaatctgctggccttgaatgcggcgatcgaagcggcgcgggccggggaccatggccgtgggttcgccgtggtggcgtccgaagtccgtgtgcttgcgcagaagacccaggagtccacgggcagcattcagcagatgatcagcaacctgcagaccggctccgaccgtgcggccacgtccatgcaggaaaccctgggcaaggcgcaggacggtgcgagcaaggtggaacgtgcgggtgagttgctgcaagagatcgctgaaggggtgtcgggtatcagtgatcgcaacatgcagatcgcctcggccgccgaagagcagagtgcggtctcggaggacatcaaccgtaacgtcaacgagatcaatgacctggtgatccaggtcagtgccggggccgaacagacggccgttaccagccaggagctggcgcgcctggccgagcagcagcaacgtctggtcaatcggttcaaggtggcctgatcgattggcgcacagcacgccctgccgaatgcagccacctgcgtcacagggcgttggttaagcgaaatcttcctcgaagtgttcccgctcacctcgcgtgtcgccctggcgccgcaccacctccatctgccgcagttccacgcggcggatcttgccggagatggtcttgggcagttcgctgacgaactcgatacgccgcacccgtttgtaaggcgccaggtgctcgcgggcaaaggccaggatgtgccgggccagctcggcgtcgcccggcgcatcatgggccaggatcaggaacgccttgggcaccgccaggcgcaacgggtcggggctcggcaccacggccacttccatgaccgccgggtgttcgatcaaggcgctttccaactcgaacgggctgatgcggtagtcggacgccttgaacacatcgtcggcgcgcccgacgaaagtgatgtagccgtcggcgtcgacctgcgcggtgtcgccggtgcggtagtagccgtcgcgcatgacctcggcggttttctccgggctgtcctcgtagcacagcatcaggccgagggggcgcacatccaggggcagggcgacttcgccttcgctgcccggaatgccgtccgggtcgagcaaggccacctggtagcccggcagcgggcggcccatggagccgggcttgagtacctggcctggcgtgttgcccaccagcgcggtggtttccgattggccgaaaccatcacgcagcggcaagccccaggcgtgctggatctgctcgatgatttccgggttcagcggctcgcccgcgccgaccagttcgcgcaggctcaggcgtgatttgtagctggcgagatcctcctggatcagcatgcgccacacggtgggcggcgcgcacaggctggtcacgccgtagcgttccaacgcactgagcaaggccggcgcgctgaaccgtgcgacgttatggataaagatgcacgcgccggcattccacggggcgaacaggcagctccaggcatgcttggcccagccgggtgacgagatattaaggtgcaggtcgcccggctgcaggccgatccagtacatggtcgacaggtggcccaccgggtagctctggtggctgtgcagcaccatctttggcttggatgtggtgccggaggtgaagtagagcagcatcgggtcggtggccagggtgcgaccttcggcctcgaagtgctcggggtgttcgaaggcggcgctgtgggccacccaaccttgcggcgccgagcccacgcagacgcgactgcaaccgtccgccagcccgacgaatttatgcacgtgggcttcgccgaccaccaggtgacgcacctgcccgcgttcgatgcggtcgcgcaggtcgtcggggttcagcagggcggtggcggggatgaccacggcgccgagcttgaacgcggcgagcatggtgtcccacagcgccacatcgttgccgagcatcaacagcacccggtcaccgcgacgcacaccgagggcgcgcaagtggttggccacctggttggagcgcgtggccagttgctcgaagctgtagcgctgctcactgccgtcttcttcgacgatccacagtgcatctgccgcgttgccctcggccattgtgtcgaaatagtccagggcccagttgaattcgtccagttgcggccaacggaaatcccggacagcggtggcgtagtcggtgcggtgagcgagcagaaaatcccgagcggccaggaagggctgggtcatggtggctgtccttaattattgttgtggggactgaccccccggctggaccgagaggctggaccgagtataggcacgcataaatcagagcagaacgctcaaaaacaccggtgcgttgtgcaaaaaagtcatgggtgttgcgccaggcagcagtgagattgacggttaagacataaaagtccaagatggaattataagtacaaaaacatgcgattcatctctttcccactcttgccaaaccaacaacaacttgcgagaacccgatcatgaagaaacgctccctcgtcaccgtcctggccttgagcctgcttgcatccggccccttggccgccgccgagaaaaccctgcgcatcggcatcgaggcggcttacccaccgttcgcgtccaagaccgaggaaggcaagatcgtcggcttcgactacgacatcggcaatgcgttgtgtgcgcagatgaaggtcaagtgcgtgtgggtcgaaggtgagttcgacggcctgattccttccctcaaggtgaagaaaatcgatatggcgctgtcgtccatgaccatcaacgaagaccgcaagaagtcggtggatttcacccacaagtattacttcacctcatcgcggctggtgatgaaggaaggcgccgtggtggacgaccagtacgccagcctcaagggcaagaccgtcggcgtgcagcgcgcaaccaccacggatcgctacgccaccgaggtgttcgagcccaagggcatcaacgtcaagcgctacaacaataacgaagagatctacatggacctggccgccgggcggctggatgcgatcttcgccgacaccatccccttgaatgacttcctgcagatgccccgtggccagggctacgcgtttgtcggcccggaactcaaggacccgaaatacgtgggcgagggcgccgggattgccgtgcgcaagggcaatagcgagttggtcagccagttgaacgcggccatcgacggcattcgcgccagtggcgagtaccagaagatttcgcagcagtacttcaaggccgacatctacggcgactgacgcccaggcaaactcgatcaatgtgggagggggcttgcccccgatagcggtctttcattgccagatgtattggctgatgcagcgccatcgggggcaagccccctcccacatttgatttacagtgttcgatcaggtttttaattctttcaaatgcttgtagaccgtcgcccgccccatgcccagcacattggccacatagttcgacgcgctcttgcccttgaacgcgccttcggcatgcaacgccagcaccagctcacgcttgtggtcgcgcgtcagcaaattcaggctcaactgccgctcgcgcaaccacgcatgcaaaaacgtgttgatgcgttcctgccagtcatcacgaaacaacgcgtccggctgcgggatcagcttgctcggcgacaggaacaagtccagcgccgccttggcgttttcaaacagtgaaatattcaggttgatgcacagcaccgccaggcgtcggccttggtggtcgtgcagcacggtgctcaggctgcggattttctgaccgtcccagttgagcttttcgtacgggccgatattcacctcgctgacgtcggcgtcgagcatgtcctccagcgccgagtcatcgccgatgctgcgcttggacaggttgttggcgatgtaatcgaccttttgcgagcgcaggtcatgcagcaccgcttcggcgtgggggaagaacagcgtggcgatggcgtcggccattgcgcggaagttctgcatgacggtgtcttgttcagcggtgttcatcaatggggctccaggcgggcaggggagagcataccagcgtcgaggccgaagcgtgtcagcgcctccggcagcgctgcgccgcgcaccagtgcggcactggcctggcccatggccggtgaggtctggatgccataaccgccctgtgccgctacccagaacaggcctggtaccacggaatcaaaacccgcgagcaaatcaccgtcgtgcacaaagctgcgcagaccggcccaggtgcgggtcgggcggcggatggtcagggtcgtggcttcttcgatctggtagatgcccatggcgatgtccagttcttcaggctgaatgtcctggggggcgaccgggtcggcgttggccggtgagccaaggaacatgccggcgtcgggtttcatgtagaaggattcgtccagcgccaccagcatcggccagtgatgactgtcgacgccgtcggggccggcgaagatgaacgccgagcgccgcttgggctgcaagccgatggacgcggccccggcgagcccgccgatgtgatcggcccaggcgccggcggcgttgatgatgatcggcgcggtgtaggaggcgtcctgggtttgtaccagccagatgccgtcgccgtcgcggctcaagccgagcacgtggctgtcggtacgcacctcgccaccgttgcgacggataccgcgcaggtagccctggtgcagggcgtcggtgtcgatgtcactggcggtggggtcatacagcgcaccgtgaactttttcgcggcgcaggatcggcaacttcgcgcaggcctggtcggcgctgagcagctcgacctgggccacggtggccttggcactctggtattgggtgttcagctcggctgcatcaccgatgaagtccacggtcatttcgccccgtggcgtgagcaacgggtgttcgcagaaacccggcggcgggttgtcgaaaaacgcccggctggccagggtcagcgcccgcacctgcggggtgccataggcggcgctgaacagtgccgccgaacgcccggtggagtgataggccgggtggctttcgcgctccagcacgagcaccttgccgtgctgcgacaaccagaaaccggtggaggcgccggcgataccgccgccaatgatgatgaaatctgcgtggttcatagctgtctccagagggcattggccagggcgatgtcttccaggcccaggccgatggagcggaagaatacatgacggtcgtaggtcggaggttgcacccattcgctgagcagttcgggcaagtcccccacgatggcacgcgggtcccacccgtgttgttcggtggcgatcagcatgtcacctgccgcgctaggggtggtctggcgatagtcgcagaatacctgcatcgcgttgaggctgtgcggcggcacttcgtgggcacgcggcgcattggtgctgatcgaggtgatcagcgccggtttgctcaagcgggcggggtcgagcaccggtccggccgacgaggtgcacagcaggatcacatcggcgtcgtccacggccgcatcgcagctggcggcgatgaccacccttgggtccaggcgcttgagttgggtgatagcctcggcgctggcgttggccaggctcggcgaaaacaggctgatgtgctgccagtcacgcagttgtttgacgtagtgcacatgcgcctgcgccaccttgccactgccaatgatcgccaggcgccttgcggataatggcgccaatgcctccaccgccagggctgtggttgccgcagtgcgggccgtggtcagttcggcagcatcgcacagcagcaggggttggccggtctgcatcgacatcaacaaggtccaagcggtcaccagcggcccttgctcacgcacgatatagggcgaggtcttgaccccgtacaccccatcctcggccagcacgcccaggtagttgataaagtcaccggcggcgcgtggaaactccaccagctgctgcgccggctgcacggcttgcccggccgccaggtcctggaacagcttgcgcaggatctgcggcacatcgacttttccgagcaattcgcgggcctgggcctggtggatcatatggggtgtgctggacatggggatctccgcaagtaaactaatttgtccattatggacttttagtttctttgggcaagcgtaaaagatcaccccgtaaagcgaaacccacccgacaattcagttttcagaaaccccaccaacgcactcaccgccttcggcacatggggcgaatacggtcgtatcaaatagatctcatcggcaaacgcgcccttgagcgtccagcccttgagtacctgcaccagcttgccgctggccaacgtggcgtgggcgctgaagtcggggagcagggcgatgcccaggtggttgagggccgcatcgcgcagggcttcgctgttgttggtggcgaagctgccggcgatgggcacggtcacacgctcgacgtttttgctgccgcgctcgaaggtccaggcgggctggtcggtgccgcgtgggtagaacaggcagttatgggcgcagaggtcattgggttcgcgcggttccccgtggcgttgcaggtattcccgggtagccaccagcaccgagccggtgtcgcacagcttccaggccacgtgggtttccggcacctggaagccgtgacgcacggccaggtcgtagccttcggcggccagtgaactcagggcgtcggacacgtccagctgaatgcgcacctgcgggtactgttgcaggaattccgacaagtgcggcaccaattgctgacgggcgaacgccactggcgcggtcagccgtaccagcccgcgaatctcgccgaccgagtcgcgtaccgaggagaagctgcgggcgatctgctcatacgcgctgcgcacttcacgggtcaacgacagccccgcgtcggtcagcctgacgctgcgcgtggtgcgggtgaccagtcgcgtgccggtggctttttccaggtcggaaatacgctggctcaccgccgacttgctcacgcccaggcgtgcggcagcggcggtgtaggtgccttgttcctccagcaccgacagccagtggatgtgcgtccacagcccttcgatctcggatttttccatgggtgcattgttcgctatggtggacaattagttctggattctgctctggtttggaacaaaccgaaagcctatcgtggtccccaacgctatccacctgggatccactgccatgaccacgaccatcgagcactacatcaacgaccagcgcgtgtcccgcgacgatcgctatcaggacgtctacaacccggccaccggcgaaaagaccgggcgcgtcgccctggccagccgccagaccgtgtccgaagccgtcgccgctgcccaggccgcgttcgccggttgggccgacacgccgccgatccgccgtgctcgcgtgctgttcgaatacctgcacctgctgcgcgaacgcaaggacgacctggcgcgcatcatcgtcgccgaacacggcaaggtcttcaccgacgcccagggcgaagtcgaccgtggcatcgacattttggagttcgcctgcggcatccccaacctgctcaagggcgagcattccgaccaagtgtcccgtggcatggacaactggacgatgcgccaaccgctgggcgtggtggcgggcgtgacgccgttcaacttcccggtgatggtgccgatgtggatgtacccgatcgccatcgcggcgggcaacaccttcatcctcaagccaagccccaccgacccgagcgcctcgctgttcatggccgaactgctgcgtgaagccggcttgcccaaaggcgtgttcaacgtggtgcagggcgacaaggaatcggtggacgcgctgatcgaacacccggacgtcaaggccgtgagctttgtcggctccacgccgattgcccaatacatctacgaaaccggtgcgcgcaacggcaagcgcgtgcaaggcctgggcggcgcgaaaaaccacatggtggtgatgcccgacgccgatatcgaaaaaaccgccgacgccttgatgggcgccgcctacggcagtgccggcgagcgctgcatggccatctccgtggcagtgctggtgggcgatgtgggtgacaaagtcatcgcggcgctgaccgaacgcgccaagcacctgcgcatcaccgacggtcgtgacctcaaggccgagatgggcccgattgtgtcccatgccgccctggaacgcatcagcggctacatcgaacaaggcgtgcaggccggcgcgcaactgctgctcgacgggcgtgactatgtgccgactgaggctggccttgaaaatggcttctggctcggtgcgaccctgttcgaccacgtgacccgagaaatgagcatctaccgcgaagaaatcttcggcccggtactggcctgcgtgcgtgtgaatgactttgccgaggcgatcaagctggtcaacgaccacgagttcggcaacggcgtcagctgctttacccgcgacggcaacatcgcccgcgaattcgcgcggcgcattgaagtgggcatggtcggcatcaacgtgccgatccccgtgccgatggcctggcacggctttggcggctggaagaaaagcctgttcggcgacatgcatgcctatggcaccgagggcgtgcgcttctacaccaaacagaagtcgatcatgcagcgctggtcggaaagcatcgagcagggcgcggagtttgcgatgccggtgtcgaagtaagcgccgacccgaccctcattgagcgatccacacgctgacgcacaacccttgttgcgccagcgtgtcgctgaatgccaactgtactcggcaaccggtacgctcgctgatcgccttgacgatcgacaagcccaagccggagccggcttgctccgagccgaggctgcgatagaacgggtcgaacacccgcagctgttcctcctcggcgatgcctgggccggtgtctttgacttgcagcagcacgccaccttcaatccccttcaccgacagatcgatacgcccgccttgcggggtgtagcggatggcgttgtccactaggttcttgaccagggtgaacaggtccagttcgttgaacagcacctgcacgtcctcggtgctttcgacgccgatatcgatctgcttgcgctcggccaggggcagtaagtcttccagcacctgtcgataaaggccatgcaccgacagcggcgtttgcacccgcgttgacggcgcttgcgccgccgccagcgccaacagttgatcgataaggttgcgcccgcgctcgataccccgggacagcggcaaaaaccgctcgcggctgaccgctgacaagtccgtcgcggccaggcgttcggcttgcagcgacagggcggtcatcggtgagcgcagctcatgggcggcgtcggcgacaaagcgacgctggctgtccatggactggccgacgcgggccagcaggcgattgatggcgaccacgaacgggcgcacttccgtgggcagatgctgctcgtcaatcgggtgcagtgcctgttcgtcgcgctggtcgatctcggcggccagtacgccgatggggcgaaacagtttgcgcaccaggtcgcccaccaccagcaacagcacggggaacaggatcaggaacggtagcagactgcgccaggcgctctcgcgggcatccttgtcgcgggcgtcctgttcctgggccacggcgatacgttcgccctttgaggtggtgtgcaccagcacccgaaaggcttcgccggccacttgcaccgtggcgaggccatcggcgagcgtggtggggaacggcaggggcaacgcctcgtcactgccgcctgtcgcctggttgccatcgcccaggtgctggatgatcacccgcgattcttcatcatcgccgtcaatcgccttgccctgggggtagtgcagcgtcatctgttggcggtcgaacagcatggccacctggcgcaaggtggcgtcctgttgttcgtgggcttcatcaaaggccgagacaaacgcaaacacgctggccagcagcgccaccaacagaatcgccagggacagcgtcaccgagaggcgcagctgcaccgactcgctcaaacgttttttgaaaccatccatcccatgcccctgacgttcttgatcacgtgactgcccaacttgcgccgcaaggcgtgaatcaggaactcgatggcgttgctttcaacctcattgccccagccatacaggcggtcttccagttcgctgcgtgacaggattgctcccgggcggatcagcaaggcttgcaacagcgcaaattcacgactggacagggccacgccacgcagttcctcggtgctggcttctttggagagcaggtccagcgacaccacgccgttaccgagcaacgacgacgcgctgccgcctttgcggcgcagtacggcgcgcatgcgggcgagcagttcgggcatgtcgaaaggtttgagcaagtagtcgtcggcaccgccatcgaggccacgcaggcggtcatcgaggctgtcgcgggcagtgatgatcagcagcggcagcgcgttgttgcgcgcacggatgatctccagcacttgcaggccgtccttgccgggcaggccgaggtccaacagcaccaggtcgtaggggtgggtgtcgagggcggccagggcggtgaggccgttcttgacccagtcggcggcgtagctggcgtcgctgagggcgcgctggatcgcatcgccaatcatggggtcgtcttcgaccagcagtatccgcatatccctctccgaaaaaaacgcggcgagatcatcgccgcgtctgtattgaagcatctgggcagacatttgtccggcatcagcccttcatcgtatcgaaggccttgagcaggtcatccatcgcggccttgcagtcggcctggttcgggctgcctgcgcgcaacgcctccagtgcgcggtcgatggctttatccagcacatgccagtcactggcggcgcggggcttgattccggcttcagcggagtcccagctggtttccaggtccttaatgcgggctttggccgcgggcaggtcgttcttggcgacgagggccgatacgtccaccgcgatgttgcggaactcggacaggtcgcccagtttcgacgcctggtgttggctggcggcggcacgggtggtgtccttgggcttatcggcgggtttggagcagccggtggcgatgcccagcatgaagatcgcagaaacaatggcgacgcggcggatcaggtgttgaacagggcgcatgaggatttccttgagtgggttgttcatgaggtgatggctttgcggttgccgacgctcagttgcgctacggcgaccagcaggacaatgacgcagaggaacagcgcgctggtccaactggcgcccatacccaggccgccgtaggtcttggcttgggtgagcaggtcgccgagggaggcgccaaacgggcgggtgaggatgtaggcgatccagaaggtcagcacactgttgacccccaggcgccaggccaccagggccacggcgatcaaaccggcgaagatcaccgcgccgagggtgaagcccaggcccagtgcttcggtggccaggtcgccggcggcggtgccgagggcaaaggtgcagagcaccgtggtccagtagaacccttcacgccgaggagtgacgatgtcgcggatcgacaggctgcgttcggtacggaaccagaccatgaagttgaggcccagcagcaccgagaaaatcgccgtgctggtgtacaggctcacgtcgagtttatcggtgagaatgtcggtgatctgcgtgccgacgatgctcaccagtactacggtgagccagtagatccatggggtgtaggctttggtgcgcagctgcaagcacagcgcgcccgccagcagcgcggccatgccgaggctggtccagccggcgccgaaaccagcgtcgacggcgaggtagtccgcgccggtttcgcccacggtcgtggacaggattttgatcacccagaatgacagcgtcacctcgggtactttgttcagccaacgggctgctgtggcattcatcgggttacctctccttgatggcgcggcggtgggcgcaggagagaaggtaaaccgcgaaacttagctgggactgagggccgctgcgtttttacagcacatgggccaaacccagcgtggtgaggtgcaccacgctgcccatgttcggcgcatgcaggcccgaactgcgcaccaggatggcttggccgggcacaccctcatccggttgcaacgccacggtcagggtgcaggtgttgccaccgaattcgcgctcggtgaccacgccacggcaaccggaatcgtcggtggtgctcaggtgcagttgctccgggcgcagcatgatgcgtgcagcaccgtgattggcctggcggtcgaccgacacacgccccaacgcgcagtgggcccagccgccctcgatttgcgcgggtatgactacggcctcgccgagaaacaatgcggtctgttcgtccacggggtactggtacaggtccatcggatgccccgattgcaccaggcgcccctggcgcatcaccgccaactggtcggcgaacgacagcgcctcactttgatcgtgggtcaccagaatggtggtgatgcccgcatcgctcagcagccgtgcgaccatcttgcgcatggccgagcgcaggccggtgtccagtgccgaaaacggttcatccagcagcatcagccgcggctgttgcgccaacgcccgcgccagcgccacccgttgctgctggccgccggacagttcgtgaggccaacgttgggccatgttggcgtccagggacacgctgtccatcagctcggcgatgcgttcgtgccgcgtggcgtgtctggtggcaaggccaaagccgatattgtcggccacggtcatgtgcgggaacagcgcgccgtcctgcggcacataaccgatctggcgctggtgcgcgggcacggcgtgggtggcgtccaccagcacctggccgttgagggtcaggctgccgctgtcggggaattcaaaaccggcaatcatgcgcagcaaggtggtcttgcccgagccggatggtccgacgatcaccgtgcggctgccgttgggcactgccaggctgacgtcggccagggcgcgcagggtgccgaaggtcttgcagagggcgtggagttcgagggcgttcatcggcctgccgtgcgtttggattggtggtaaaggaggccggtcaacggcagtgagagcaggatcatgatcaacgcgtaaggtgctgctgcggcgtagtcgatctcgctggtcatcgcccagaagccggtggccagggtgcgcgtgccgttgggggcgagcagcagggtggcggtcagctcgttggtgatcgccaggaacaccagcgccgcgcccgctgcggcagccggagccgccaggcgcatcgtaatcagccacagggcgcggcccggcgagcggccaaggctgcgcgccatgttttccagctccacaggcgcctgggcgataccggcgcgcaggctgactagcgcccgtggcaggaacatcagcaggtaggcgagcaatacggtgatggtggtctggtagatcggccgggcgaagtggatagtcaccgtgaccagcgccagcgccacgacaatgccgggcaacgaactggtgatgtagttgcagctttccaaaatgcgttgcaggcgccccggtgcacgaatcgacagccaggcaatcggcaccgccgcgcaagtggtcaacaccgcaccggcaatacccaacagcacggtttgttccagtgccggcagcaactcgctgaactgccagacctcgcgaccaccggcgatcagccatttgcccagggtgaccagcggcacgccgagggccaaggcaccggtcgcggcttgcaagccgagggcgagcagggtggttgcggggctcagccgcacgatgcgttgctcgcgggcgctgccggaaccgacccgcgcataacgtgcatggccgcgagcggcggactcgacgctgagcatcgccaggcaacacagggccagcaccgccgcgagcatattcgccgccgggccgttaaaggtggatttgaactgatcgaaaatcgccgtggtgaaggtgtcgaagcggatcatcgcgtacaggccatattcggccagcagatgcaggcccaccagcagcgcaccgccgcagatcgccaggcgcaactggggcaacaccacgcgccagaacaccgcccagggcttgaggcccagggactcggccacgtcttcaattgcagggtccagccggcgcagggtcgccgccaccggcaggtacagaaaggggaaataggcaatcaccgacaccagcacgccagcgggcaagccatggatcgacggcaccaggctgacccacgcgtaactgtgcacaaacgccggcaccgccagcggcgcgaccgccagcaacgaccaggcgcggcggccgggcaggtcggtgcgctcggtcaaccaggcgagcgcgatgcccaacacgatgcacaacggcaaggtgaacagcaccagcagcacggtgttggtcagcaactcgccgacgcgcgggcgccagaccagcgcttcgatctgcgcccagccgatttgccacgacacgccgattacaaacgcgatcggcaacagcgccaacaacgaaaccagcaccgacaaaccggtgacccaggtgcccccacggcttttgaacaggctgtgggggcgtttgcgtggcggcgcgtgggcgatgccgggaatcgacgattcaggcagcaatcagagcagtccggcctgggtcatcaactcgacggccttcttgctgttgagcttggacgcgtcgaccttgggggcatccagttgtgccagcggggtcagcttggggttggattgagcgttctcgccgaccgcgtattcaaacgagttaccgtccttgaggatcgcctggccgtctttgccggtgatccacttcaagaaggcctgggcctgctcctgatgcttgctggaggccaagacaccggcaccggagatgctcacaaacgcgcccgggtcctggtgcttgaagtagtgcagttgggtatttttgctgttttcgccggtcttggattggtcgacgaagctgtagtagtgatagatcacaccgctgtcgacctggccggcgttgacggccttgagcaccgcgctgttgccacggtagatgctcgcgttggccttcattgccttgagccagtcaagggttgcggcttcgcccttgagttcgagcacggcggcgacgatggcctggaagtcggcaccggccggtgacgcggcccagcggcctttccagctgggcgacgccaggtccagcagggatttgggcaggtcggcttctttcaatttgctcgggttgtacacgaacaccgtggagcgcgcagcaatgcccacccatttgccatgggccgggcggtaggcggcgtccacctgttcacgcgtggtcggcgcgaccggggcgaacaggcccgcattgtccaccagcaccatggccggggagttttcagtgaggaacacatccgccggcgaggccgcgccttcctgcacgagctggttgcccatctcggtgtcgtcgccattgcggatggttaccggaatcccggtttcctgggtgaagccttcgacccacgccttggtcaggctttcatgctgggcgttgtacaccacgatgccgaccggctcgctggcggcatacacatgcccggcactgaccagggccgtggcgagcagggcttgtttgacgaacgaggggaggcgagtggtcatgcggtgagcgctccggggttttttgactgcacgggaaatccgcgagaggtcgattgagagtagaccaataggaatcatttgcatgttggggcgcggcgaatgtagagctgggaatgagaaaaaaacgtcaaaaatacagttaacaaatgtgatgagggtgatcaggcgtagcaggccaaaagcgggaggtggtttggttgtttttcaacatgagggttgacggccaaggtaatgccgaatactgtacataaacacagtgtttagcgctgaccaaccaaacctcggcaacctcagccatgccaaacactgtgtgcaagttaacggattaacttgatgcacaggctcgttttaccgagccatttttattgatagagagggaactcatgtcctacccagaaagcaaactcaccggtctgatcggtttcgcccaagccgcaaaagtgacaggtggctggtccggccctgtggtcagtatcaccacgctcgatcaactcaaggccaatatcggcgacaccaccccacgggtactggtgatcaacagtaatatctcggcgtcgagcctgaccaaagtcaacatgggcgccaacaagaccctgattggctcgttccagaaccgtaccctggagaatattcacctgcgtgcaacggcgcagtcgcagaacatcattctgcagaatcttatcttcaagcattcggcaagtatcaaggccaatgacgatatccaggtctacttgaactacggcagcaagtattggatcgaccattgctctttcgtcgggcacagctggtccaccactgacggtagcgaagataaactactgtatatcggggaaaaggccgattatgccaccatcagcaactgtttctttggcagtcataagtatggtctgatcttcggtcacccggcggatgataacaatgccgcgttcaatggttacccgcacctgacgctgtgccataaccgcttcgacaatatggaagtgcgtgcgcctggcttgatgcgttacggttattttcatgtgtacaacaactacatcaataacttccacctcggttttaccctggcacaaaatgccaacatcctttctgaaagtaactactttggcgaaggcagccaaaataaaggcatgttggatgacaagggcaacgggaccttcaccgacatcaacagcgtgccgccaatcactaatcagaagtcgcccaaggcgcagtggacggcgtcatccaactatggctataccttgaagaccgccgcacaagccaaggattttacccagaagaatgccggcgcccagtcggttgcactggtctttggtagttgattagctagctttctacttagtgctcacttaataccggtgccactgtatttatatcaaggatataaatacagtgatggcctttataatctaaataattcttcatgttgcgacaggcaggcttccatgttaaaccttgtttcgcacttgcagagccaactatcccttgctctttcagccactatcaagttgttggctgtcatgtgctatttaatcttcgcttgtcacttaagcgtcagcaaaaggacatcatcatgaaacatgcgaatcacacacccactcgctggacacgggccgatgcgctgaaagttaatgagaatgacccgacgacgacacagccgttagtgagtcctgactttcctgtcatgagtgacacggtctttatctgggacaccatgcccttgcgtgaacttggtggtacggtggtatcggtcaatggctggtcagtgatcttcaccctgacggctgatcgtcgcccccatgatccacaattcatcaacgccgatggccgttacgacatcaagcgcgactgggaagaccgccatggccatgcgcgtatctgctactggtattcgcgcaccggcaaggactggatcttcggcggtcgtgtcatggccgaaggggtttcgccgaccacgcgggaatgggcaggtacaccgatcctgctgaataacaacggcgatatcgacctgtattacacctgcgtcacaccgggcgccaccattgccaaagtcagggggcaggtggtcacctcggataccggcgtgaccctgcggggctttgatcaggtcaaatcgttgtttgatgccgacggtatctattaccaaaccgaagcgcaaaattcgacttggaactttcgcgatcccagcccctttatcgatccaaaagatggcaggttgtacatggtgttcgaaggcaacgttgccggcgagcgcgggacacacgaagtaggcccgaatgaaataggcctggtgccgcccgggcatgaagatgtcggcggtgcgcgttatcaggtcggctgcatcggcattgcggtggccaaagacctcaacggtgacgagtgggagattttgccaccgctggtgaccgccgttggtgtgaacgaccagaccgaacggccgcactatgtgttccaggacaacaagtactacctgttcaccatcagtcacaagttcacctacgcggacggcgtgacgggcccggatggcgtgtatggtttcgtcagcgaccggctgttcggcccttacacaccgatgaacgcctccggcctggtgctcggcaatccgccttcgcagcccttccagacatactcccactgtgtaatgcccaacggcctcgtgacatcgtttatcgacagtgtgcccaccactggcgatgactaccgtatcggcggcaccgaagcgccgacggtcaggattgtgttgaagggcgatcgttcgtttgtgcaggaggcttatgactatggctacatcccggcgatgcgcgatgtagtgttgagccagtgactgccgtgcaatcgtcagcctgatcatctggtgtaaaccgatgcaaaagtgggagggggcttgcctcctcccacttttttaaccgcaatccagttcggtggccgaagcactgtcgagcaagctggcggtgtagagcagggtgtgtcagtgcgagcatgtttaattgatgaataaataaactaatggatggtttaattggtgatgggaatttccttcggatggtattcgtcttacaaacgcagcctacagtattatcggtaggacttagttgctggtttgctggcggtttttttttatcgtgcaggaacgctctacagtgagcgtttaagatgtgtgataaaaaatcatgaggtgttttggcttgacaaatttatgtgcggataaataatttaatcgcttgctttaaaaggtgtgaaatcatttttttataaaaacaaggatgaaaatgatggatgctcaaaattcagtaaaaaacagatcaaatgaaaggctctctaagaatgagatttatagagtgtgcgaggccggttacaacgaggtggctaatgcaattgtccggcatgccgcgcttagggaacttgaaaaattcggcgagattatctctgctcgtcctctgacgcatcagggtatggccttgttttttggcaccctttgggctttttttaaagacgtgcctgcgggaatcgttgcgttggctgcacgtgttacggatgaatggatcaaggaggatatgtggaatggcacagccaaggctgcgcatattctttatgcttcggttgatgagtatggtctgcaccagcatagtaaacatatgctgcctacccatcatcagatgtttaaacaactgacgactcatctggggctttccgatgctgatctgtttaatccgtctaacgtactcccagagggtactgcgatggggaataacacgcataggatgtaccgctccgagtttttgggcgaagcgttgggttttcatttggcttcggaaatgacctcgtccagagagtttcagtactttcttgaagggtttaaaaaatacgcccgtgagtatggcttggtggatgaggaagacccggtcttggcgttcttcgctatccactgcgaagtcgaacccatgcacgtagcgaccgggcgggagatcgtaatttcatacttggagaaaaacccaggtatcgctccacaagccatgcgcggtgcgatggcattcatggacggttttgaacatatgttttcggcacttaatcgtcgccttgccgacccgcagagtctttgaattctggagattgtctacatgtataagtcttatgagtgtcagatctgtcactacgtttattccgaggcattgggtgagcttctagtcgacgttgaggcaggaacaaggtggggcgagctagacgacaattttcagtgtccgcactgtcgggcaaagaaaaaaatgttcagagagattgtgaggtaaatgcacgactttctgagtgcaatgctattttcgacactgctttcaataagcgttggaccgatagccttgatcattctaaggcagtccatcgtctttggctttcgcagtgcattgcccgcagccctgggggcggcagttgccgacgcggtatttgcagctgtcgcctttacaggcttgaaggtggtcgaagcattttgggtcgccaatcatcagctattgacgtggggagcgattgcctacctcctttatcttggtgttaccacattcaagaacgctgctggcacgatgcagataacgtgcaccgcaggatttgtaccggtctttttactgacgttgactagcccgttcaccattgcggcgatttcttcctatgccatcgccagcggcgcccagcttcaggggcagggaatctactggaatttgctgggtgttctagtgggctcgtttctcgggcaaatgttgtatgcagcagggggtggggggatgaagaagctgtttgctgaacgttcaggttttggtgtgctcaatcgagcgagcggggtgtgtctgattggatttgcgggctggcagatggcttgtgctctatcgctataggcttgcccccgatggcggtggatgagtcagctagaggtaagctgactcatccaccgccatcggggcgagccacctcccacattaatcctgcgttcctagcgccgacctgtgcgggtactcacatccacccaaaccgccaacaccagaatgctgcccttcacgatcatctgccagtaactgtccacatccagcatcgacatgccgttatccaggctggtaatcaccagcgccccgagcaacgcgccatacaccgtgcccgagccgccgcgcatcgatgtgccgccaataaagcacgcggcgatggcatccaactcgcccatgctccccgccgacggcgagccggcagccaggcgcgcagtgttgaccaacccagcgagcgcacacatcacgcccatgatgccgaagatccacagcttcaccgcctgcacgttgatgcccgacaggcgcgtggcttccatattgctgcccaccgcatacacgcggcggccgaacacggtctggctggtgacgtagctgaatacaccgagcagtaccagcaacagcagcaccggcacggggatgccgtcgtagctgttgagggtggtgacgaacccggccagcaccgcgccgatcaccaccacgcgcaacacatcacgcacccatgaatgcgccgccaggccatgcagtgcgcggttgcgccgttgtttccaggtgaggaacagggtcagggcaaacagtaagacaccgaggccgatcccgaccgaatggggcaaatacccttggcccacatacaccaaggaaggcgacaccggcgcaatggtggtaccgcccgtgatccccaggagaatcccgcgaaacgccaacatcccgcccaggccaacgataaacgacgggatacgcaggtaggccgtcatgtagccgttggccaacccgatcatcaagccgcacagggcaaccaggctcaggttcgccaacagcggcacgtgatacaccacgtccaagatcgccgccaacccgcccagcaagccgagcaacgagcccaccgacaaatcgatctcgccactgatgatcaccagcaccatgccgcacgccaggatcccggtgatcgacatctgccgcagcaggttggacaggttgcgcggcgtgaggaagccaccctcggtctgccagctgaaaaacagccagatcaccgcgacggcgatcaccagggcaagcattttgtagcgggtaaacagctgtttgagctgattcatctacgcggtcttccgatcattattattgtgttggctgagcgccgcggcgagcacctgttcctgggtgagtccctcgttgatgaagtcgccgcgcaactggccgtcgccgatcaccagcacgcggttggacacgccgagcacttcggccagttccgaggagaccatgatgatcgacaccccctcggccgccagcgcgcccatcagtttatagatctcatacttggcgcccacgtccaccccgcgtgtgggctcatcgaggatcagcacgcggggcttggccatgagcattttcgccagtacggccttttgctggttgccaccggacaggctggtgatcggcaggaacgggctggcggtcttgaggtgcaggcgcgcgatctgctggtcgatgctgcccagttcggcttcggcgtcgatgcgcgtcaggtgggcgtaggtgtcgagcaccgccaaggtgatgttctggcccacgccgaagtcgggaatgatgccctggcgcttgcggtcctcgggcaccatgcacagcccggcgcggatcgatttgagcggcgtgcgcgtgtcgatcacctggccgtccagccacacctcggcgctgtagcggccggggtaggcgccgaacagcgccgacaccagttccgtgcgcccggcgccgaccaacccggcaatgccgaggatttccccgcgcttgagcacaaaggacacatcgtccacgcgcttgcgcctggggttgtcgacgtcgtagcaggtgacgttgcgcgcttcgaaaatcacctcgcctaccgcatggggctcggtggggtagaggttgctcatctcgcggccgaccatttgggtgatgatctgcgcaatgtccatgtcggccatggcggtggtcgcgatgtgcttgccgtcgcggattaccgcaacggtgtcgcataccgccgccacttcgtcgagcttgtgcgagatgtacacgcaggccacgcccttggccttgagaccgcggatgatatccagcagcacctcgatttccgagcgggtcagggccgaggagggctcgtcgagaatcagcagccgcgcctgtttgttcagggccttggcgatttccaccagctgctggtaaccgccgccgtactgcgacaccggcagcgccacgttcatgtccggcaccttgagctcgcgcatcaaagcctcggcacggtggaacatcgccgggtagttcatgcgcccacccggcagggtcagttcatggcccatgaagatgttttcggccaccgacaggtcgggcaccagggtcagttcctggtggatgatcacgatgccggcggcctcggtttcgctgatcgactgggccttgagtggctgcccgtcccagagaatttcaccgtcccaggtgccgtggggatagaccgccgatagcaccttcatcaaggtggatttaccggccccgttctcgccgcacaggccgacgcattcccccggccgcaccttgatatcgatgccgtccagcgcgttgacctcgccaaagcgtttgacgatgccgttcatttgcagcaggtagtcggacatggcggtcactgcccggccatctgctctttggtgtagaacccgtctttctccaacaggtcgatattggccttggtcagcggggtcggggtgagcaggatggtgtcgaccttcttgctgccattgtcgtactgcgagctgtaggtgggtttttcgttacgtgccagttgcaccgagagtttggccgcttcggtggcgatcagcttgagcggcttgtacacggtcatggtctgggtgccgtcgatcacgcgcttgaccgccgcgaggtcggcgtcctggccggagatcggcaccttacccgccagtttctgcgcggccagggcctggatcgcgccgccggcggtggcgtcgttggaggcgacgatggcgtcgatcttgttgttattgcgggtcagggcattctccacgatgctcagggcctcggtggggttccattccttcacccattgctgcccgaccaccttgatatcgcccttgtcgatggccggttgaagcaccttcatctggccttcgcgcagcaccttggcgttgttgtcggtgggcgcgccgccgagcagaaagtaattgcccttgggcgccgcttgcagcacgccgctggcctgcatttcgccgactttttcgttatcgaaggagatgtaggcgtcgatgtccgcgttgaggatcaggcggtcataggacaccaccttgatcccggctttcttggcttcggcgacggcgttggtgagcacggtggcgttgaacggcacgatgacgatcacatcgacgccacgggagatcaggttttcgatctgcgagatctgtttttgctcgttggcatcggccgattgcacgaagaccttggcgtcgagtttctctgcggcggcgacgaagtagtcgcggtcgcgggaccagcgttccaggcgcaggtcatcgatggaaaaaccgatcttcgggtgggctgagtcggccatgaccggcagggcgagcagggccagggcagtggcgatgagggtgcgtttcatggttgtgcgtccttttattgttgttggaaagacagtggcgaaacgggttttttgttgtgagcggttctgttgtggcgagcgggcttgctgtggtgagcgggcttgccccgcgttggggcgcgaagcggccccttcccggcgacatgttttacctgacacaccgcggcgcctggttctggggctgcttcgcagcccaacgcggggcaagcccgctcgccacaacaagcctggtcaccacaacaagcccgctcgccacacgttcagcggtagataaagcgattcacaataccttccagcatctcctgccggccactcaccgcctgcgggttcaactcctgcgcaaaggcatgctcggccagcgactccaggctgaattcacccgccagcaccgcttggcccagcggctgctgccagccggcgtaacgctggtccttgaactgctgcaaccggtcgttttcaaccatggctgctgctcgctccagcgccagggccaacacatccatcgccgccacatgtccgtggaacaggtccacctcatcaaggctctggcggcgtaccttggaatcgaaattgtagccgccattcttgaaacccccggccttgaggatttcataggtggccagggtcatttcctcgacgctgttggggaactggtcggtgtcccagccgttctgcgggtcgccacggttggcgtcgatgctgccgaaaatccccagggacacagcagtggcgatctcatgatgaaaactgtgcccggccagggtcgcgtggttggcctcgatgttcaccttgatctcatgctccagcccgaactcatgcaggaagccgaacaccgtggcgctgtcgtaatcgtattggtgcttggtcggctcctggggcttgggctcgatcagcaggtcgccggtgaagccgatcttgtgtttgtgctccaccaccatgcgcataaagcgcccgagctgttcgcgctcgcgcttgaggtcggtgttgagcagggtttcatagccttcacgaccgccccacagcacatagttggcgcccttgagccgcagcgtcgcgttcatcgcactgaacacctgggcggcggcgtaggcaaacacctccgggtccgggttgctcgcggcgccggcggcaaagcgcgggttgctgaagcagttggcggtgccccacagcagtttgatgccggtctgttcctgatggcgttccaggtggtcgaccatctgcgcaaagtgattgcggtattccttgagcgacctgccttcgggggcgacgtcggtgtcgtgaaagctgtagtagtcgatgcccagcttggagaaaaactcgaaggccgcgtccgccttgccgatggccagttccatcgggtcgccactgcgctgccatggccgcttgaacgtgcccacgccaaacatatccgcccctggccagacgaaggtgtgccaatagcaggccgccatgcgcaggtgctcgcgcatcggtttgccgaggatgattttattggcgtcgtaatggcgaaaggcgaggggagagtcgctgctggggccttcgaagcgaaccttctcgacaccggggaagtacggcatggcgttttccttattgttcttggcggtgtctggatactagcaacggcacctggcctgctgattatgaaaatcaccaacggacagtgcgattttgcgcggcaggggctaggctgttgcgaccggccccaggacaacaacaatgaaaaccctaccgcccgtgcaccgcatcgccttgctgttcaacggcagcaaaatctacgaccgtggcatcatcgccggcatcggcaattacctgagcagcacccgcgcttcctgggacttgttcctcgaggaggacttcctgtgccgcctcaaaggtatcgagcgctggcagggcgacggcatcattgccgacttcgatgacccactgatcggcgaggcgctggccggtagcaaggtgccggtggtggcggtgggcggatcctatgaagatgcacgcgcctaccccaagggcatcccctatgtggccaccgacaacgcggccttgatgaaactggcctacgagcatctgattgaggctggagtgacgcggtttgcctgtttcagcctgcccgaagcccaggccaatcgctgggcccaggagcgcgaaaaggccttcaagcggctgctgcaacgcgatggcttgccagtgcagatctatcgcggcctgggcaccagcgcgccgctgtgggacagcgcggtggagcagcagatcgcctggctgcaaagcctgcccaagcccatcgggattattgcggtcaccgacgcgcgcgcccggcaactgctgcaagcctgtctcaccgccggcatcgcggtgccggaagaggtggcgctgatcggtatcgacaacgacccactgacccgcaccctcacgcgcgtgccgttgagttcggtgatccagggcaccgaaaccatgggccgcaccgccgccgcgctgctgcaccagatgctgcacggcaagccttgcacgggcacgcaggtgctggtgccgccggatgcgatcaacgtgcaggcctcgagcctgcaccaacccttgggcaacccttacgtgatgcaggcgctgctgtttatccgccaatacgcctgccagggcatcaagaccgcccaggtggcggcttatgtcggggtgtcgcgttcatcgctggagtcgcactttcgcaaggcgcgcgggtgcagcgtgcacgatgagatcctgcgcttcaaactcgccagcgccgccaagggcttgcagggcaaccacctggcgattgccgacatcgcccagcagtgcggcttcaagtcggcgcagtacctgcacaccgtgttccggcgcgagttcggctgcacgccacgggaataccagcacagccattagaaactttgcaggcatcgcccattcgccgctggacttgcaccgtacagactagggagaatggttttttgtggcgtaaatggaagctcccatgaccgacagtgcccagcgtgccgccagcgacatcgacctgatgaccgaagtggccatgctttattacctcgacaacatcacccaggaagccattgccaagcgcttcgacctgtcgcgggtcaaggtcagtcgcttgctcaagcgcgcccgtgatgaaggggtggtggaggtgcgggtgttgcagcatccggccctgaacacggagttggagcaggcgctggtcgagcgtttccagttggaccgcgccttgatcgcggtcgaccacggcgaccccgacacccagcgctcggccgtggccagcctggtcgccaattacctgaacaagaccctcaccgacggcatgatcgtcgccgtcggcatgggccgcaacgtgggcgccgtggccgagaacgtgttcttgccggtgacgcgcaactgcacctttgtgtgcgccatcggcggctcgctcaaggccggcgaatacatgaaccccgaccatatctgccggcgcctggccctgcgttttggcgccgagagcgaaaccctgtatgccccggccctggtggccaacccggaactgcgcagcgtgctgatcaacaacgacaccgtgcgctccaccctcgaccgtgcgcgccgcgccgatatcgccttgatcggcatcggcgacatgagcgagaacagcaacatggtgcgcatgggctggttctcaccccaggaaatcgcccaggcccgggtgtcgggtacagtcggtgacatgatgggctacgactttatcgacatccatggccaaccggcggtcaacgccatgcagggccgggtgatcggcctgtcggtacaggaactggtgcgcattcccgacgtggtggcgattgccagcgaaaacaccaaggcggcggccaccctcggtgcgttgcgctccggggtgatcaacaccctggcgacgaccgtgtcgaatgcctacacgatcctcgccctggatgatgcaacgcgtcgctaggtgacatcttgtatgtggtgagcccgcttgttgtggtgaacaggcttgttgtggcgagcgggctttctgtggtgagcgggcttgccccgcgctgggnnnnnnnnnnnnnnnnnnnnnnnnnnnnnnnnnnnnnnnnnnnnnnnnnnnnnnnnnnnnnnnnnnnnnnnnnnnncccagcgcggggcaagcccgctcaccacagaaagcgggctcaccacacaaagcaggctcacaactacgccaccaaccgcgcctcaaccgattcggccaggttggtcaggatcaggcagcacgacaccgcacccgcgtccaacacccccagggagcgttcccccaggcggctggcacggccgatcttggccaccaggtcgcgggtggaatcgcggccctgggacgcggcgctttgcatccggtgcaacgcttcgcggaacgtcgcgccgctggcctgggcctgttcaaacgcttccaccgccgggatcaaggtgtccatcaggcacttgtcacccacgccagcgtcgctgatgtcctgcagtgaggtcaggccgccgcgcagcagcctggcgaaggtcgccccgtcgatgctgtcgcggtcgcgcacttcgtcggccatgccgatgaacaggctgccatacagcgggcccatggagccgccgatgccttccatcaacgccagggtcagttcgtccagcgcttcggccagggacagttcgcggccttccagagtcttgccgcagcgcgagaaccccttggccatgttgatgccgtggtcgccgtcgccgatggcgccgtccacttcactgaggtattcgcggttggcaacgatgatcgacaccaggttggtgacaatggcgccgccggtgttgctcgggaaatgttcgcgcatgcttcactccgactgggtcatgccgatggagcggcaaggttggtcgatcaggcggctcagctcggcgtctaggccgagcagggtcagggtcacgcccatcatttccagggacgtgaagtagttgcccacgtaacaacgatgaatgcgcaggcccttggcgcgcagttggcgctcgacctcggcgtagaaaatataaagctccatcaccggcgtggcgcccaggcccgagaccagcaccaccacgctctggtcctgggtgaagtcgcggtcggccaggatcggcgcaagcatgcgctcggccatggcggcggcggactccaccggcaccacttcgatacccggttcgccatggtggccgatgcccagttccatcaggccgtcggcaatctggaagttgggtttgcctaccgccggaatggtgcagggcgtgagccccacgccgatggagcggcaatggtccacggccttctgcgccacgcggatcacgccgtcaaggtcgtagccctgggcggcggcggcaccgccgatcttccacatgaagatctcgccggccacgccacgccgcttggcgatttcggcgagcggggcggaggccacgtcgtcgttggcgaccacggtgcggatgttcatggctttgctggcggccattttcatcgccagcttcacgttcatgttgtcgccggcatagttgccatacaggcatgccacgcccgcgccctggtcggcggcacggaacgcgtcgaagaagctcttggcggtgggcgaagagaagatctcgcccaccgccaccgcatccaccagccccgggccgacatagccgagaaacgccggctcatgccccgaaccgccgccggtgacgatgcccacctggccggccggtgagagggtgcgcttgccgatgacccgtggattgctctcgtactgcaccagttccgggtgcgcgaggaggatgcccgcgagcatgtcctcgaccaccaggtccggatcattgatgactcgattcatagggtgtttccttgttcttattcgtctggaatcggtttactgaatgctgtagccgccgtcgatcaccacgttttcgccggtgatcatcttggccgcgtcgctgaccaggtagagcaccaggccggcgatttcttccggctgggcgaagcgccccaccgggatctgcaatttggcccgttcgcccagttcgcccgcccaggctttcttgcccagcgcggtttcgacgatggttggcgacacggcgttgacgttgatgccgtggggcgcccattccatagccagtaccttggtcatgccgaccacggcagccttgctcgcgcagtaggccacatgccggtccaggccgatgacggcggcctgggaggcgaggttgacgatacgcccgccgccttgctcgatcatatgctgcgcacaggcctgcgccatgaagaagctggccttgagattgatatccagggtggtgtcccaggcgttttcatctacgtccagggccttgtcgagcagggcgacccccgcgctgttgaccaggtaatcgatgcgcccgagcccggcagcggcctgatccacggcggcctgcagcgaatcgagctggcgcaggtcggccaccagccccacatgacccgcgccgaggctggcagccacttcgaccaccgccgggtcacggtccagcaacgccacccgggcgccgcgctccaccagcaactgggcacaggccaggccgataccggcggcgcccccggtgatcacggcgcaacggccggtgaggtcgaacgcctggttccagaaattggacattgcacacactccacttagcgttttttcttgcgccagacatcaatcaacaccgcaagcacgatgatcaatcccttggccacttgttggtaatacgacgacaccccgagcaggttcaaaccgttgttgatcacaccgatcagcagcgcgccaaacaacgtgccgacaatgctgccggtgccacccgacaggctggtgccgccgatcaccaccgccgcaatcgcatccagctcataagacacgcccgcctggggcagggccgaggtggtgcgcgccgccagcaccacaccggccaaccccgccagcaggccggaaatcacatacaccgagaacgtgaccttgcgcacgccgatgccggaggtgcgcgcgcttttttcgttgccgcccacggcgtacacgtagcgcccgtaggtggtgtagcgcagcaccatccagaagatcagcgcgaccaccgcaaagataatgatcggcacgccaatggggccgagcttgccgatgcccagggcgaggaagctgtccggcaggtcggtgaccgggctgccgtcgttgagaataaaggtcatgccccgcgccacgctgagcatgccgagggtggcgacaaagggcgggatgctcaggttggccaccatgaaaccgttgaccacgccaagcatggccccggcaaacatccccgcactcaccgccgccagcaggccatagccctgggtggcgaccaacgcgctgcacaaaccggcaaaggccaggatcgagcccaccgacaggtcaatgcccttggtgaggatcacgtaggtcatgcccacggccagaatgccgttgatggaggtctggcgcaggatgtccatccagttgcgccaggtcatgaagtattcgctggaaaacgccagcaccagacacagcaggataaacaccagcggcaggccgaagcggtcgagggacaagcgcaggcgattgcgcggcggggcagtgacgggtgcggcgaggactttactgttcatgaggcaagactcaacaaggcttcctgggaaagggcggtatcgctgctgacggtcaccaggcggccgcccttgaacaccgcgatgcgatcactcaggtgcagcaattccggcgcctcggacgagaccacaatggccgcaccgccggcgcgcacgaattcgtcgagcaggtgatagatctcctgcttggcgccttcgtcgatgccgcgcgtcggctcatcgcacagcaggcagatcggctgggtcgacaggcatttggcgagcaccactttctgctggttgccgccgctcatggactccaccggcaggtccagggacgaaatcttgatctgcagacgcttgaccatgctctgcgccagggcctgttccttgcgcgcattgatcaccgaccagctcgacaattgcttgtaggccgacagcgcgatgttggcgaggatgctggcgctgagcaccaggccactgtccttgcggtcttcggtgaccagggacatgccggcgcggatggtcgccgctggcgtgccgatgggcaacggctggccttgcagggtggcactgccggcgtccggcagggtcaggccatacaggcagttgaggaattcgctgcggcccgagcccatcagcccatagatgccgaggatttcgccctggcgcagttgcaggctgatgtcctggaactcgccgtcgcggctcaggccactgacatccaggcacgtggtggcagcgcattcgcggccgactttatggtcgatgcgctgcagctcctggccgacgatgccgcgcaccaggtgggcgcggtcgatatcggccatgcgcccgctttccacaaaggcgccgtcgcggaagatgctgtagtcatcggcaatctgcgccagttcactcaggcggtgcgacacatagatgattccggcgccacgcgcggtcaggcggcggatcgccttgaacagggtttgcgcttcatgttcgccgatggccgaggtgggctcgtccatgatcatcacctggcagtcatggctgaacgccttggcgatctccaccagctggatctgcgccacgctcaggcgatgcatggggctggtggcatccacgtcgaactccaggctttgcagcagttggcgggtgcgtcggttcagttccttgctgtcgacgatacaaccggcgcggcgcggttcgcggcccagccatatattttcggcgacggtcatgtaggggatgggttccagctcctgggtgatcatcgccaccccggcggcgagcgccgcgctggggcggtcgaactgcaccggctggccgttgagcaggatgctgccggcgtcacgctgggtgatgcccatcaagatgctgaggaaggtggatttgccggcgccattgccgccgcacagtgcgtgcacgctgccggcccgcagggccaggcgcccgtcgcgcagggcagggaccccggcgtaggccttggaaacttgttcagcctggagcagtaatggcggggccatcggtgtgtcctcttgctgattttcttattaggtaggcttaggcaacagcctgatcatatgatcggatagtgatcatatgtttaaactggtcgagttggttttgtcaatggcttggcgcagcattcgcctgaggttttagggttttcgcgggttgctgccttgaaataagccttgacagcagcagggctgtcgtccgctaatgattgtgcataatttcagtgagtgatcatttgatcggtctgatggagaaacagtaatgggtgcacaaacgacgttttcggtggccatcggatgcgacgaggcgggctttgagctcaaggaaatgctcaagcgctttatcgaaggcctggggtatggggtcgaggactttggctgccattcgtccagcccggtgctgtatccggacatcgcagcggcggtggccacggcggtgggggcgggtgagcagcgcctgggtgtgctgatctgtggcaccggcatcggcatggcgatttccgccaacaagatcaagggtgtgcgggcggcccaggcccacgacacctattcggccgagcgcgcccgcaagagcaacgatgcgcagatcctgtccatcggtgcacgggtgatcggccccgagctggccaagagcatcgtcaaagtgttcctggagtcggagttcgaagcggagcgctccgggaagaaagtcgagcgcatcactgcgctcgaacaggcgaacagggcgttgccgtcagacgactgagccgcttcagaacagcgccttgacctgcaggcccagcaccagggcgttgtcgatgttgtcaccggaaaacgcccccggctcgatgatgtattgcacatccgggcgcagggtcagccagggggtggcctggtagccgtagctgagttcgatcagttgttcggcgttgttcaggttggggtagtcggtcccggccttgaaggcggcctgttcctgtacctcgcggctgcgcgggttcggcacggcacggccatagcccagcgctacggtgtcccgcggccggccctcgaacggtttgtacagcaccacacctgcgccataccacttgctgaacggcgacgccgcttcgctggcggcagaatactggccgaaggcgtgtaaaacacgaccgctggaggaatccgaagcccaaaccgcctggtcgatcagcaggtagtgaccgccgcgaccgctgacttccttgttgctgccgatgcgtttcacgtcggagctgtcgtagtaataacccagcttgtattcacccggcaggctgccggtgtgtttgtagatcaattcgatcggcaccacggtgccggtggtgtgcttggggtccaggcgccaggcgcggctggagttgccgttgctttgcgggtcgacgttgaacgcggccacgcgcagttgccaggccggcgagaagtcatatttaacccgcgcacccaggcgtgcattcgggtagttggtccaaccgctgccgccggacatattcagcgggtgcccgcagaacccggcgttcatgaagttgcacagaatcccgctgtcgaggccgccgaggtcattgcccatggccatgtagccgagcttgacgttcagcgccggggtgaacagcgtgcgttcgtagctcaactcggtgaggcgagtgtagaggccgccgtagttttcctggatcggcaggcggttgcccaccaggtcctcggaggcactgttgccgcgccggtcattgatcgtgagctggatgcgatcgccattggtgaggccgtagagcttgcccaggtcgaactgcacgccgagcttgaggttctgcgagtagcgcgccgaacggtgctggccgccatgggcgttgtaggcggtttcgccactgtagtcgccgctgaagcggatgccctgtgcgtcgagttcacggcgcaggccgccccagtcgccggtcagggtggtgtcatcggcttgcacgggcagggcggcacccagggccaggcccagcagcaggcgcccaaggggaatatgagaagtgggggtcatgcgggtttttccaggcacaaggcgcggcgccggggaggcgccgcgcgaacggggggttatggcagggcgtaggcgatcacgtagtcgccacggtcggtggactggcgtgcgccaccggcggtgatgacgatgtactgcttgccggttttcggcgacacgtaggtcatcgggccgccttggctgccgacgggcaggcgggctttccagacttcatcaccgttgccgctgttgaaggcgcgcaggtagaagtcctgggtgccggcgataaagatcaggccgccctgggtcgacagggtgccgccaagggtcggcaggccgatcttgatcggcaggtgcatgcggatgcccagggggccggtgtcttccacggtgccgaccggcacttgccaggcgaccttttgcgtcttcatgtcgatcgcggtcaaggtgccgaacggcggcgcctggcacggaatgccggccaccgacaggaagcggtttttgttcaccgcatacggcgtgcccttgagcggcacagcgcccatgccggtgttcagcgcttcgccaccggacgcggcctgggccttgttctgcgacggaatcatctggatccacaggcccaggcgcatgtcgttgacgaagataaaaccgtgcaccgggtcggtggaaatgctgccccagttcatgccgcccagggagcccgggaagctcagggatttatcggtgcccggcgcggtgtacaggccgtcgtagcgcatgcccttgaagtcgatgcggcacagcaactggtcaaacggcgtggcgccccacatgtccgattcggtcagggtctgtgcgccgatctgcggcatgccgaccgattttggctgggtcgccgagtagggttcgttggggatgttggcggccttgaccgggacttccttcacctcggtcagcggcttgccggtggcacggtcgagcacgtagatctgcccggccttggtgccgatcaccaccgcaggcacagccttgtcgctgccgggcggggtgaagtcgatcaggctcggctgcatcggcaggtcgaagtcccacaggtcattgtggacggtctggtacacccatttttccgcgccggtggaggcgtccagcgccagtaccgacgcgccgtatttgtgattgagctgggtgcgctcgacaccgtagatgtcggtggacgaactgcccatcggcaggaagaccgtgttcatcagcgggtcataggacatcggcgcccagctgttcggcgtgctgcgcacgtaggtgctgccgtcggccggggcttttttgtcttgcgggttgccggggtcgaacgcccagcgcatctggccggtgatcacgtcgaagccacggatcacgccgccgggcatgtcggtctgcacgttgtcggccacacgaccgccgaccaccacggtggtgccggcgatcagcggcgccgaggacagttggtagtagctgtccggcacgttacccaggccggctttcaaatccacctggccgtgggtgccgaagtcttcgcagaactggccggtgtcggcgtccacggcgatcaggcgtgcatcgatggtgttggtcagcaagcgacgctggcactgcgcaccggcgggcacgctggcggcgatgatcggcgagctgttcggttgggtcggctgggcaatcggagcggtggcgtcgaagtaggccatgccacggcaacgctgccacaccgccgatttggcgttgacctcgttcttccacagctctttgccggtgtcggcgtcgagggcgatcaggttgttgtgtggcgtgcagatgaacactttgttgccgatctgcagcggggtgagctggtcttcggcaccgttgccgtcgctgatggcgacgtcgccggtgtggtaggtccaggccactttaagcttgttgatgttgtcacgattgatctggtccagcgcagcgaagcggctgccaccttcggtgttgccgtagtgcgcccagtctttctgctcatcggcagcggccaccggcgtgatgccagggccgttaccggtgggagcaacgcttgggtgggcaacaaacatattgcccgccgccacggccacgcccaccgccaataccgccgccacgccataggcgccgcgagcaggccggttgaccagcagcgggtacaccagcgctaccaccgtgccgatcaccgcgaacatgaacacgcgggagaacagcggccagaacaccaggcccacatccgccaccgcccagagagccgtgccgaccaggaaggccgcgaacagccacgcgcccgccggcttgcgtcgggcaatcagcaggcccgacacggccatggccgcaccgccgatcaggaagtaccaggaacctcccaggctcaccagtttgccgccgccaatggccagcgcgaggccgagcagggcgatgatcacgcccaggcccagcagtaagattctagaggcgccagcggcgcgcgatgctcgtttcatgtcgacagcactcgaatgtgagagggcaaagacgcgattttagcaagataagtaaccagttagtacattgtgcgtggtaatagactcttacggggatggtgatgatcgcgcacaacaaaaagccgcttgcccggtgtcagcggcaagcggctcttgtcagcgatcaccgaaacgccggcacgacctgctcgataaacaacgccagcgacttcttcttctcggcatgggacaggctgttgtcgcaccagaagctgaactcatccacgcccagttcctggtagtactggatgcgcgggatgatttctgcggcggtgccgatcattgcggtcttgtgcaggctctccagctcgaactcggggcgaccggcgaacttctcttccgggctgggctccaggaagccgttgaccggcacgctcttgttgccgaaccaggcatcgaaggtgcgatagaaccgggagatggccttggccccgactttccagccgtccggatcgtcctcggcgtgcacgtgggtgtggcgcagcaccatcagttgcgggcgcggtacgccagggttgttgtccagggcagcctggaatttgttcttcaggtcgaggacttcttcgtcgcccttcatcagcggcgtgaccatcacgttgcaaccgttggccacggcgaagttgtgggagtccgggtcgcgggcggcgatccacatcggcgggttgggctgctggatcggcttgggcacgctggtggaggtggggaatttccagatgtcgccgtcatgggcgtagtcgccttgccacaacgcacgtaccaccgggaccatttcgcgcagggcctggccgccgctgctggcaggcatgccgccggccatgcggtcgaattccacctggtaggcgccacgggccaggccgacttccatgcgcccgttgctgatcacgtccagcagcgcacattcaccggccacccgcagcgggtgccagaacggcgcgatgatggtgccggcgccgaggtggatggtggtggtcttggctgcgaggtaagccagcagcggcatcgggcttggcgagatggtgtattccatggcgtggtgttcgccaatccacacggtgctgaagccaccggcctcggccatcagggtcaactcggtcaggtcttcgaacaactggcggtggctgacgctttcgtcccaacgttccatgtgtacgaacagggaaaacttcatgacgcttacctcggatctattgtgatcggcctgtcgactgcaggcccttaagtgctctcgccaatctgaagcatgccggtgatgacggctgttcggcggattgattgttggtataccataatacggaatatccgcaaaacatttctctccaacggtcacaccctcacctcacaaggaaggcgagcctgatgaacataaaacaaaaattgatcctggcctttgcggtgatcgccagtctgccggtgattctggtggctgtgctgatcatcctcaacgtgcgccatgcggcgcgggacggctttgtcgacagcagcgggcgcgagatccgccaggtcgacaatgccatgcagctgtttttcgaaggcatcagccagaacgtcggctacctggcggcgcacccgcaattgcagggcatccagggcgacctcaagcgttacctggccagcgacgccgcgcaagtcacccccggcgagcgtgaccagcaactgttcacgctgttcgaagggctggccaagagtcattcggcctacacctatttatcgctgggcaccgaagacggcggttatgtgttctggcccggtgaccccaagcttgccagctacgacccgcgcactcgcccgtggtacaaggcagccatggcagagccgggcaagacccggcgtaccgaggcctattactgggcggccgacgacgtggtgctggtcagtacggtgcaaagcttcaacgaccgccagggcaaggtcagcggggtggtgaacatcgacgtgtcgctcaagcagctcaccgatctggtcaagcagatcaagctgggggagagcggttacctgatgttgatggaggccaacaacacggtgttggtggacccgaatgacccgtcccacaacttcaagaaactcggcgagttgggcgagggttatcgccagttgagcgagaccggcgaaggcctggtgcaggtcgagttggcgggggagcgctacatggcgctggtgtggccgtccaaggcgttgggctggcgctttgtcggtgtagtgcgggaaagcgaggtgatggccggtgcggcgcgcctgacctggctgatcgccgccattgccgtggtgtgtggcgtgctgtttgccatggcgggcgcgtggtttgcagggttgatcgtcaagccgattcgcggtgtggccagcggcctggaaggtatcgcccagggcgaaggtgacctgaccgcacgcctgacggtgagcggccgcgatgaaacggcgcaactggccggctggttcaaccagttcctggaagcgatccgtacgctgatccagcgcattggccaggccgccgggcagatccatacccgctccggcagtgccactgaggtctcggtggaaatggccgatgtcgccgagcgccagcgtgaagccgtggacatggtgtccacggccttccatgaaatggtcgccacttccaacgaagtcgcgcgctcctgcagccaggccgccgactcggccgacaacggccagcgccaggcccacaccgggcagcagcagatcgatgcggcggtgagcagtgtcgggcgcttgagcgaagagatcggccactctgcccaggccatggagcagttggaaaaagacagcaacgatatccagtcgatcctcggcaccatccgatccatcgccgagcagaccaacctgctggccctcaacgccgccattgaggccgcccgcgccggagagcagggccgtggctttgcggtggtggcggacgaagtacgtgccctggccaagcgcacggcggattccaccggcgagatcgacggactgctgggcaacctggcgcggcgcacgcaccagatgggcaagcagatgcacgcgagcctggaggtgtcccaggaaaccgtggtgtcgatcaatgaggcgcgggccagctttgggttgatccgtgaatcggtggatgtgatccgcgacatgaacacccagatcgccaccgccgctgaagagcagcaccaagtggccgaggatatcaatcggcacatcagccagattcacggggatgcgcagttggtggcgagcctggccgactccacgcgccaggatgcacagcagttgacggcgttgtcgcagacgttgaaccagttggtcagccgcttccgcacctgatttttgtaggagctagcaagctcgctcctacagagagtgcagtcaggccggcatgggcagggcgcccatcttgccgtggcaatacaccagtggcccggcgttctgccggggcacgatcaggttcttcacagcgcccaccatgatcgcgtggtcgccgccttcatattcacgccacaactcgcactcgatcaccgccgtggcattcgctaggatcgggttgcccagttcactcaaggtccattcgatgccctgggccttgtccttgcccttgcgcgcaaaggcgtaggcttcggtctgctgcccaccggagagcacgtggatggcaaagcgcttgttcttgatcagcaccgggtacgagtcggagctgtagttggggcaaaacagcaccagggccgggtccatcgacagcgagctgaaggcactggcggtcagcccgacgatctggccctcgtcatccagcgtggtgatcacggtgaccccggacggaaacgaacccatcacttgtttgtagatggcggcatcgatcatgggaaggtcctcagacagtgtggcggtttttatggatttgtaggtctgatggtataccgtaatacgacgcgtgcaagatctttttcagccacccgatgaacgcatgcctttggtcatatcaccaataaatacggggttttcagcgagaaacagccataagccatgtggcacaattgcagatcagatgcgtgccaggactacggatcagtcttgtgaaaatgctggaataccataatatggtgttcatctgaggggcgccatgaagcgcccccggtttggcgtcaaacaactataagatcagaccaacgcgagttcatttccatgccccagatgtcccggcaagaccccctgatcgagcatcacacggtcgattacgtccctcccgcagagcgccacggaaaggcccgcgacctgttcaccctatggttcagcaccaacattgcaccgctgcccattgtcaccggcgccatggttgcccaggtgttccatctcaacctggtgtgggggctgctggcgattgccctcgggcatctgctcggcggcatcgtgattgccctcgcatccgcccagggcccgcgcatgggtatcccgcagatggtgcagagccggggccagttcggccgctatggcgcgctgttgatcgtgttctttgccgcgctgatctacatcggcttcttcatttccaacatcgtgctggccggcaagtccatcgtcggcatcgtgccgtcggtgccggttccggcgagcatcctgatcggtgcgctcagcgccaccgccatcggcgtgatcggctaccgctttatccatagcctcaaccgcatcggcacctgggtgatgggcagcgcgctgctggccggtttcatctacatcttcgcccatgacctgccggcggacttcctcacccgtggcggcttcaatgccgctggctggttggccacggtgtcgctcggtgttatctggcagatcagtttttcgccctacaccagcgactactcacgctacctgccggcggatatcggcattacccggccgttcatcgcgacctacctgggcgcgaccctcggcaccatgttgtccttcgccttcggcctggtggcggcactggccacgcccgaaggcaccgaagccatggtcgcggtcaagcaggccacaggctggctcggcccgatcctgatggtgctgttcctgctcaacatcatcagccacaacgccttgaatctgtatggcgcggtgctatcgatcatcacctcgatccagaccttcgccagccagtggacgccgagcatcaaggtgcgcgtggtgctgtccggcgtgattctcgcgggctgctgcgtggtggcgctgggtgcgtcggcggacttcatctcgcagttcatcggcctaatcctcgcgctgctgctggtgctggtgccgtgggcgtcgatcaacctgatcgacttctacgtgatcaagcgcggggtgtacgacattgcctcgatcttccaggcggacggcggtgtttacgggcgcttcaatctgcacgcaatcgtggcgtatttcatcggcatcctcgtgcaactgccgtttgccaatacgtcgctgtacgtggggccgtgggccaacctggtggacggcgcagacctgtcgtggctggtggggttggtagtgacgtgtccgttgtattactgcttggcgacgcgccagcagacgcagcgggtcaagttggtgaacgtgggttacaccgactaatcctcgtgacggcaaaagtgcccggccatgtgccgggtatttttttgcctgcaatgttcgggtgttgcgcaggcgaaaaaaggccgccacaacccgacgttgtggcggcccaaggggtgactcagtgcgcgccggcggccttgttcagatcgctttcagcccattcggtatacacacacgcatccgccgtggcccagcgcacccgcaccgggtcgccggccttgagtggcatgccggcggcggacagtgccttgaccgtcatcgaggtgccgccgagggtttttacgctgcaggtctggctttcgccgaggaacaatacctcgccgacgatggcggacacttcgttccaaccggctgccaagggttcaaggtcagcctgcgccacgctcagcgccagggccttttccgggcgcaccatcagcagcacatcctgttcgctgcgtagcccgctggtcaggcggatcgacagcgattgtccttcgaacgacgccgccccattgccttgggccttgagcttgaggaagttggagttgcccaggaaagacgcgacaaacgcattcggcgggttctggtacaggtcgaaaccgctgcccaggccgacgatcttgccgtggctgaaaatcgcaatgcgctgggacaaacgcatggcttcttcctgatcgtgggtcacgtagacgatggtgatgcccaggcgccggtgcagctggcgcagttcgtcttgcaggtcctcacgcagctttttgtcgagggcgccgaggggttcgtccatcagcaggatgcgcggttcgtacaccagcgctcgggcgatggccacgcgttgctgctggccgccggagagttgcgaagggcggcggtgggcgaacggttccagttgcaccagcttgagcatggcgtcgacgcgcttttcacgctcggcgctggccagtttgcggatcgccagggggaaggcgatgttgtcgcgcaccgataaatgcgggaacagcgagtagcgctggaacaccatgccgatgtcacgcttgtgcggcggcacgttgaccagggattggccgcccaccaggatctcgccgctgctgggggtttcaaacccggcgagcatcgacagggtggtgcttttgcccgagccgctggagccgaggaaggtgaggaattcgccgtcctggatgtccagcgagatgttgtccacggcggcgaattcgccgtagtacttgttcaggttgcgcaggctgaccaggggttggccagggttgcgagtggggtctttgatcacggcactcatgggttaatcctcggcgttcaagcgcgggtttcagtgcgtcgacgggcgacggcggcaatcaccatgaccagcaccgacaggccgatcagcagcgtcgacgcgacggcgatcaccggcgtcaggtcctggcgcagggtggtccacattttcacgggtagggtttgcagggtcgggctggccatcatcacgctgagcaccacttcgtcccaggaaaccaggaaggcaaacagtgcaccggcgaccatgccggggcggatcgccggaaaggtcaccttgaacaccgcttgcaagcgcgacgcgccgcagatcaccgcggcatcttcaatcgactggtcgaacagcttcagtgagttgatgatcgagatgatggtgaacggcaaggcgacgatcacatggctgaccacaaacgcgaacatcgtgccggtgtagccgagcttgagaaacagcgcgtacaccgccacggcgatgatcaccagcggcacgatcatcggcagggtgaacaggccgtagagcaactcgcggccggggaagcgcccgcgcaccagggcaaacgcggtgggcaggcccagggcaacggcgaacacggtggtcagcaccgccaccttgaggctggccatggcggcgttcatccagtcggcattggagaagaactggccgtaccatttcagggtccagcccggtggcgggaacaccagccattgggatgagccgaacgacagcaacacgataaacacgatcggcagcaacaggaacaagccgatcagcccggtggtggtatagaggcccaagcgcatcctgcggctcatggcattgggagtcaggagcatgacggcttacctcgcgttgctggcgccaaccggggattccggctggagcttcaggtagaagtagaacagcaccagcgtgatgaagatcagcagcgccgcgccggcactggccaggccccaattgaggaacgattgcacctgttggatgatgaactcgggcagcatcatgttctgcgcaccgccgagcaacgccggggtaacgtagtaacccagggacatcacgaacaccatcaacccaccggaaaacagccccggccggcacagcggcaggaacacccggaagaagttggtccaggggctcgcgccgcagatcgagccggcctgcaggatcatcgggtcgatggcctgcatggtcgcctgcaacggcagcacgatgaacggaatcatgatgtagctcatgccgatcaccacgccggtgaggttgtgcaccatctccagcggctgatcgatgatgcccatggccatcaacgccttgttgattacgccggaggcctgcaacagcaccagccaggaataggtgcgggcgagcaggctggtccacatcgacagcagtacgatactcaggatccaccggccccagccacgcggcaccagggtaatgacccaggccaacggaaagcccagcagcaggctgaacagcgtcaccaggccggcaacggaaaacgtattgagcaacacccgcgcgtacgccgagttggcgaacagttgctcatagttgcccaggcctggcaccggctccagcaccccgcgcagcaacaggccgatcagcggagcgaggaagaacagacccaggaacagcagggccgggatcaggttgctcgacccccgccagcgttgcgccagggacggtgtcccgacgttgcgggaaagcgcgccggcagcgccgagggcgctcccggtcggtgtggttgccgccattttcatttgactagccattcattccaccgtgtcgcaatggccgggccgttcttggcccagtaggcgaaatcgagggtgatctggtccttggcatacgccgtcggcaggttgggcgcaaggaccgaatccaggcgctgtacgctgtcgatgttcaccggtgcataagcggtcaggttggagaagtcggcctggcccttggcgctgctggcactggccaggaacttcatcgcggcggccttgttcttggtgcctttgggcacgaccaggatgtcggccattaccaggttctgtttccagctcacgcccaccggtgcgccgtcttcctgcaaggcgtggatgcggccgttccagaactggcccatgctgacttcgccggaggccagcaactgttgcgattgcgcgccgccgccccaccagacgatgtcttgcttgatggtgtcgagtttcttgaaggcgcggtccaggtccagcgggtagagcttgtcggcggggacgccgtccgccagcagggccagttcgagcacgccggggcttggccatttgtaaagggcgcgtttgccggggtaggtcttggtgtcgaacagcgcggtccagtcctgaggcttgccggcgccgagcttgccttcgttgtagccgagtacgaaggagaagaagaacgagccgacgccgtggtcggagacaaagcgcgggtcgatcttgtcgcgctggatcaccgagaaatccaggggttcgagcagcccttcggcggcggcgcgcaaggcaaagtcggcctccacatccaccacgtcccactgcacgttgccgctctcgaccatggccttgagtttgccgtagtcagtggggccatcctggaccacggtgataccgctggctttgctgaacgggtcggcccaggcctgcttctgtgcgtcctgggtgctgccaccccaactgacgaagttgacgctttcggccgccatggcggcatgactggcggtggccagcaaacccgcgaacaggactgcgctgatacgtgtgttcaacaccatttttacgccctcattgttgtgtttatgagcggggcttttgagtgcccgcctatcgggagcagtcggtgtggatggcctttgcagggtcatccaacctgtggaatatcatattatggtattccaaactttgcgcaagcattttgccataccggccatctggccaaggtcattcaacgaacggaatactctccaccacttccaggtcgtagccggtcaagcccgcgtatttcagcggtgggccgaggtggcgcagcaggcccacgccgaggtcctggagaatttgtgcaccggtgcccacttccgagtaaatccgcgactgcgagcgattgaattggcgcggtgcctgggtcagttgcggcacgcgctccagcagcgcctgggacgactcatgattggccagcaccaccaccacgccgctgccttcagccgcgacgcgttgcaaggcggcccacaaggtccagttggacgggccgctgtagtcggcgccaaccaggtcgcgcagcgggtcgatcacatgcacgcgcaccagtgccggcgtgtcgcggcgcagctggcccatgaccatcgccatgtgcacgccgccgtcgatgcggtcttcgaaggtaatcaggcggaaggtgccgtgcaccgtgggcaggtcgcgttcgccgatacgcaccacggtgcgttcggtgctgaggcggtagtggatcaggtcggcgatggtgccgatcttgatgccgtgcttgcgcgcaaacacctccaggtccgggcggcgcgccatggtgccgtcatcgttcatcacctcgacgatcaccgaggccggggtgtgcccggccaggcgcgccaggtcgcaaccggcttcggtgtggccggcgcgggtcagcacgccgccgtccttggcgcgcaacgggaaaatatgccccggttgcacgatatcggcagggccggcgtcgagtgccacggcggccgccaccgtgcgcgcacggtcggcggcagagatcccggtggtcacgccggtggccgcttcgatggacacggtaaacgcagtgctgaacacgctgccattgctcggcaccatctgttccaggcccaggcgctggcaatgttcatcggtcagggtcaggcagatcaggccacgggcttcgcgggccatgaaactgatagtctcggcggtgcagcacgccgcaggcaacaataggtcgccttcgttttcccgatcttcgtcgtccaccaggagcaccatcttgccctggcgatagtcttcgatgatgtctgcgatgctgttgaaggacatggaggatgctcggcttgttggttgtatgtattatggtataccacaaaaattcaataagaggatgtgcgatgaaggcctactggattgcccacgtggatgtggcggatgccgagcaatacacgcaatacaccagacgtgcgccggcggcgtttgcgaagtttggcgggcggtttctggccaggggcgggcgcagtgtcgcgctggaaggcggaccggcacggcagcgcaatgtggtgattgagtttgatagctacgagcaggcggtggcgtgttatgagtctgccgaatatcaggaggcgaaggcgcaccgtgaaggggcaggggtggcgcagatcatcatcgttgaagggctggcaccctagatgatcaggccagacgttgggttaaatgtgggagggggcttgcccccgataacagtgtgtcagccactggataaggtgactgaaccaccaccatcgcgggcaagcccccgcccacattggaaccctgtttggtcgagaggtcagcggatgaagtggatcttgccgctgtcgtcattgccgatatagatgccatacaccccggcctgccgctcctcgatataacgttctaggatctgccggatcgccggatagtaaatgctgtcccagggaatctcctcaggcgcaaagaacttataatccagcgtctccggcccgaactgcccggtaatctccagcgcaatcgcgcggaagatgatgtacacctcgctgatcctgggcacgctgaagatcgagtagggcgagacgatttccgcgcgcacgccgctttcttcccagacttcccgcagcgcggcctgttcggtggtctcgccactttccatgaagccggccggcagggtccaggtgcccgggcgaggcgggattgcccgttggcacaacagatacttgccgtcctgctcgatgatgcagccggcgatgatcttggggttgatgtagtggatatagccgcagccccggcacatcaggcgctcatgggtatcgcccggtggcaactggtgaccgaggtcactgctgccgcaggtcgggcaaaagcgcgggctgggcatggtcagtggcctatgcgcggttctttgagggcgatgggcagggtgatctcgggcagcttgccggtctcttcctgtttgcgcttgaggtagtccagggccacggcagcggcggcgcgcacgtgatcgacgcaggcctggtgcgcggcaagcgggtcgccactcttgatcgcctggaccatgcgttccatttcctggttactgctggcgcggcggttttcctgggacaccgaggtggcgcgcaggtagctgatacgggcctgcaactggcgcaactgggtcgctgcgacatggttgccggagccttccagcagcacatcgtagaacccttgcaccgaatcgatgacctgttgcagttcgccgtccttgagggccttgcggttctcctccagggctttttccagggccttgatgtccttggccttggcgcgcagggtgaacagctgcacgatcaggccttcgagcacgcaacgcagttcatagatgtcgaccgcatcggccagggtgatgatcgccacctgcgggcccttggcatcggcgaattccaccaggccttcggattccaggtgacgcaaggcttcgcgcaccgaggtgcggctgacgccgaggcggtcgcacaggtcgcgctccaccaggcggtcgcccggcaacaactggaagttcatgatggcgctgcgcagtttctccagcacgatttcccgcagggtgaccgggttgtgattgaccttgaagctgtcgtcgagtggcaggcgtttcatgggggctgctctgtatgtaacggttaacagggggccgatcaggggccgaaattgtcggcgagtttatcacgcggtgtcctttaagcgacaaaccctcacggcccccagcctgcctcaggccaaggccggcaatggccccagcttgcccttgtggtagatcatcggcgtgaccggttgtgcgggcaggatcaggttcttcaccgcaccgacgatgatcgcatggtcaccaccgtcgtattcgcgccacagctcgcactcgatgatcgccgtggccttggccagcagcgggttgcccaggtcgctgaggtgccactcgatgcccttggccttttccttgcccttgccggcaaaggcgtaggcttcggcggtctggtcggcggacagcaggtggatcgcaaaacgcttgctgtcgcgcaggatcgggtaagtgtccgaggcatagttggggcagaacagcaccagcgccgggtcaatcgacagcgcactgaacgcgctggcggtgatgccgacgatgccgccgtccgggtcgagggtggtgaccaccgtgacgccggacgggaaggagctcatgacgtctttgtaaatgccgggttcgatcatggtcggggtctcttagcgcatcacaaaaggatcaggcatgggcgcctgggacaggttgatccacaccgttttcagctcggtgtaggccagtaccgaatctatgccgctctcgcgtccgtagccgctgttcttgaagccgccgatcggcgccatcgcggacacggcacggtaggtgttgacccagatgatccccgagcgcacgtcccgggccaggcgatgggcgcggccgaggtcgcgggtccagatgccggcggcgaggccgaactgcgagtcgttggcaatggccagcgcttcggcttcatccttgaagcggatcaccgaggcgaccgggccgaacacttcttcctgcatgatcttcatcgaattgcggtcgcattcgaacagcgtcggctcgtagaaccagccttcgcccaggccctgtgggcgcttgccgccggtgcgcaggcgcgcgccttcggcaattgcgtccgccaccaggccttcgaccacggcaagttgctgcgcggtggccatgggccccatttcgctggcgtcatcctgcgggttgccgatgcggatgcgctgggcacgtgccaccaggcgttcaacgaattcgtcgtagatttcgtcctgcaccaacaggcgtgaacccgatacgcaactctgcccggacgcggcataaatgccggcaatcgcgccgttgatggcgctgtccaggtccgcatcggcaaagatgatgttcggcgacttgccgcccagttccagggacagcttggcgaagttctccgcgctgctgcgcaccacatggcgcgccgtggccgcgccgccggtgaaggcgatcttgcgcaccagcgggtggcgggtgagggcggcgccggtgctcgggccgtagccggtgaccacgttgaccacgcccgccgggataccggcttcgagggccaggcgcgccagttcgaggatggtcgccgaggcgtgttccgacggtttgatcacgatggtgttgcctgcggccagcgctggcgcgagtttgatcgcagtcaggtacagcgggctgttccacggaatgatcgcggcgaccacgcccatggcttcgtgcacggtgtaggcgaacaggtccggcttgtccagcggcagggtgccgccttcgagcttgtcggccaggccggcggtgtagtggaagaactccggcaggtagctgacctggccacgggtttcgcggatcaacttgccgttgtcgcggctttccagctgggccagttgttccttgttctcggcgatcaggtcgcccaggcggcgcagcagtttgccccgtgcggtggcggtgaggccgcgccaggccgggctgtcgaaggcggtttgcgcggcctgtacggcgcgctccacatccgcttcgtcggcgtcaggcagttgcgcccagggttcggccagggccgggttgaggctgtcgaaagtcttgccggacagggcatcgacccattcaccgccgatgcacatctggaagcgtgcgagtgtcatgcaacgatcccctttattggattgttttgggcgtacacggtctctagaaaacccagcagcaactggttgaccaggcgcggcgattctaccggcatcatatgccgttgttcggccagcaccgcaacggtggcgccggggatgcgatcggccagttggcgcgccatctccggcgtcgaaccggggtcgagttcgccggtggcaaccagggtgggggcgcgcagcgtcttgaggtcgtcggcgcggtacatgtcctgggtggcaaacagctcatacgtggtgaggtaaccctggggatcattgcccgccagggtttcgcgcaaggccgcgatctgcgccgggttggccgcctggtactcgcggctgaaccagcgtgacagcgccgcctcggcgttggcgtccggcccgtgttcggcggcctgggcggtgcgcgcgatcacgccggcgcgctgttccgggctgcggttgaacacactgttgagcaccaccaggcccttgaggcgttcggggtagtgcagggcaaacgcccgtgcgaccagaccgcccatggaaaaaccgattaccgtggcctggggcacttgcagatggtcgagcagttccagcagctggtcggcataccccagcaacggcgtgccggaggccgggcgcgggctggcgccgtggccgagcatgtcgtaggtgatcacgcggtagtgcgtggccaggccaacgacttgcccgccccacatttctttattcaggcccacgccgtggatcaaaaccacaggctggccttggccggtcgccagataactggtgccagccggggtgcgttcagcggtgagccgaatcatggagcgctcctgcatgccttttcttattgggggtgccggcctggcttactgagccttttcggcagccagttcttccaggtcgatgtaacggttgccgatgcgtgggtgcaggcggccgccatcggcgcaacccagtaccacgacgatttcgtcggcacgcggggcatcttcgatgcgcatttccagggtgatgtagtgcgagcgcaggccttcgtcatccttgtgcatcatcgggacctggatggaagtgcccgggccgccgcgcttgttggtgaagctcaggtagctcttggctttgaccgcttcacggtagtgattgccgaagcgcagggtgtggatgatcgcgctggcgtgctcgatctcgccatcggcaccgaccacggcagctttgccataggcttcgatcttgtcggcaccgccaatgatgcccaccaggcgctcgaccatcagcgccccgaggtcggagcagttggcacggatttccggcttcaggtcttcgacgaaaccacggcccagccatgggtttttcagcaccacggccaggccgaccatggtcaccggggtatcagcggccttgccgccttcgatgaaggtttcttctgtgtagctgacgatcttgcggatttcgaaactcatgagcggctccatcaggtgtgggggagtgggttgcgtatgatggtataccataatacgcaaagcacaagcgtcgcgaatgagtttgcgtggggtgaggcgatagagggtggtgtatgaaggtcttttcgaggtgatgttaaaaaatgttagattgaaaaaatacttcacataatctgttcattggtggatgatcggccccaattccaatgcggctcgccggtgtggtgtcagccgccgttttcccctggagtacctatgaataataagaatgtcggtgtgatcggtttgggcgcgatggggctgggcattgcccgctcgctgttgcgcgctggtttcagtgtgcatgcctgtgatgtacgtgaggcagtcacccggcagttcgccggggaaggcggagtggcgtgctcgtcaccggcgcagatggccgaggcctgtgatgtgatcatcaccgtggtggtcaacgccgagcagaccgagactgtgctgtttggtacgggcggtgccgtggcggcgctgcgccctgcgagcctggtgatcggttgcgccaccgtggccccgacctacgccgtggacctcggccggcggctgggcgaacacgggctgctgtacctggatgcgccgatttccggcggtgcggccaaggccgccgccggtgagatgaccatgatgacctcaggcccaaaggccgcctatgccaaggctgatgcggtgctggcgggcatggccggcaaggtttatcgcctgggcgacgtccatggactcggctccaaggtcaagatcatcaaccagttgcttgccggcgtgcatatcgcggcgtctgccgaggccatggccctgggcctgcgtgaaggggtggatgccgatgccttgtacgaggtgatcacccacagcgccggcaattcctggatgttcgaaaatcgtgtgccgcacatcctcaaggccgactacacgccactgtcggcggtggatattttcgttaaggacctcggcctggtgctggataccgcccgtgccagcaagttcccactgccgctgtcggccactgcgcaccagatgttcatgcaggcctccagcgccggttttggccgcgaggacgactcggcggtgatcaagattttccccggtatcgagttgccgactgccaagcccgaaccggtgtaaggaacattttatgactgaccacaccacacgcccgttgctgggttgcattgccgacgatttcaccggtgccaccgacctggccaacatgttggtgcgcggcggcatgcgcacggtgcagagcattggcatccccagccgagaagttgcagacggcctggatgcagatgccattgtcatcgccctcaagtcgcgcaccacgccggccgcagacgctgtcgaggaatccctggccgcactggaatggctgcgcgcgcagggctgcgaacagattttcttcaagtattgctcaacgttcgactctaccgccgccggcaatataggccaggtcagtgaggccttgctcaaggcgctcgatgctgatttcaccctggcctgcccggcgttcccggaaaacggtcgcacgattttccgtggccacttgttcgtgcaggaccagttgctcaatgaatcgggtatgcagcatcacccgctgacacccatgtgcgacgctaatctggtgcgggtgctgcaaaaccagactgcattgccggttgggctcctgcggtacgacgcggtcgccgccggtgtggacgcgacacgcaccaggatcgccgaactgcgcgagcaaggcgtgggcattgccatcgccgatgcgctgtcggaccaggacctctataccctgggcagcgcctgcgccgacttgccgctgctcactggcggctcgggcctggccctgggcctgccgggcaatttccgccgcgcgggtaaattgcgcgattttgatgtgaatgcattgcccacggtcagggggggcgaggtggtgctggccggtagtgcgtcggtggcgacccttggacaagttgcagcctggtgcgaggcgggccgcccggcattacgcatcgatcccatcgccctggccgccggtgaaccggtggtggcgcgggcgctggcctttgctcgcaacagtgcgcacaccgtattgatctacgccaccagcaccccggccgaggtcaaggcggtgcagcaacaactgggcgtcgaacgtgccggcaccctggtagagaacgcattgggcgagctcgctgccggcctgcgtgagcagggagtgcgacgctttgtagtcgccggaggggaaacctccggtgcggtggtcaaggccctcggcgtcagcctgttgcagattggtgcacagatcgaccccggtgtgccggccacgctcagcagttccgccgaaccgctggcactggcactgaaatcgggcaacttcggggggcgcgagttctttgccaaggcccttgtgcacctggcaggaggtgcccaatgactggcatcgacgaacaggccctgcgcgaagagatctgcgatgtcggccatagcctgtatcaacgtggctataccgtcggcagcgccggcaatatcagtgcgcgcctggatgatggctggttgattacgcctaccgacgtctgtctggggcgtcttgcacctggggcgattgccaaggtcaacctggaaggcgagtgggtgtccggggacaaaccttcgaagaccctggccctgcaccgtcaggtgtatgaccgcaatccctcggtgggcggggtggtgcatacccattcgacctacctggtggcgttgaccctggccggggtgtggcagccagacgctattctgccgccgctcacgccctatcaagtgatgaaggtcgggcacattcctttgatcgactaccagcgtccgggctcgcccaccgtcgccgagcaagtggcgcaactggccaacagcgtgcgtggggtgatgcttgaacgactggggccggtggtctgggaaagctcggtggccaaggccagttacgccctggaagagttggaagaaaccgccaggctctggctgatgagcaacccccggcccgagccgctgagtcgggccgccttggatgaattacgcgagacgttcggcgcgcactggtaagccgtagatcgatattgcaagcctcccgcgagacccgcctgcggatcgtgacggggggcggcttgcaccaaaaaacaataacaacaggacattcccgaatgagcccactgattttgatgttgaccgccggcgcgggtatcgcgctgctgctgtttctggtcctcaagtacaaattccagccctttgtcgcactgatgctggtcagtattgtggtggcgctggtggccggggtgaaaccggctgatctggtggcgacgattgaaggtggcatgggcaagacccttggtcatatcgcgatcatcattgccttgggcgcgatgatcgggcggatcatcgagctgtccggcggcgccgaagccttggccaagtcgctgatcgagcgcttcggcaacagccgtacgccgctggctttgaccattgccggattcatcatcggcgtgccggtgttctttgaagtcggggtgattatcctgatgccgctggcctacggtgtggcacgccgggcacgcaagccgctgctggtgtttgcgctgccgatgtgtgcggcactgctcacggtacatgcgttcctgccgcctcatccgggtgcggtggcggcggccagccaactgggtgcggacctgggccgggtgctgatgttcggcctgccgatcaccgctttgctgtgttacgtcggctaccgcgtggcggcgcgcatgactcgccgcttttatccgatgaccgatgacattcgcgccgaagtctatggcccccatgtgaccaatgaagacttgcgggcctggaccagcggcagcaaccaggccgcgcaacagaacgccgtggccgaatcccacatgggcctggaggagtccaccagtgccatcgccgccaagttgcctgcggcgcctgcgccggggttcgggctgatcgtcagcctgatcctgctgccgattgtgttgattctactgggcaccctggctacatcattgcttacgatagagtcgacgttgcgcgccgtgatgaccgtgcttggcgcaccattggtggcgctgttgatcgacaccttgctgtgtgcctggctgctgggctcgcgtcggggctggagccgcagccaggtgtcggatgtcatcggctccgccttgccgggcgtggccatggtgatcctgatcgccggcgctggtggggtgttcggcaaagtgttggtggacaccgggatcggcgcagtcgtgtccgatatgttgcgcaccaccggtctgccggtgctggccctgggcttcctgttgaccatgctgctgcgcgcggtgcagggttctacgaccgtggccctggtgactaccgcaggaatcatcagcccgctgattgccaccctcaacctcacgcctaaccatatggcgctgctgtgcctggccatgggcggtggcgggctggcgatgtcccatatcaacgatgcaggctattggatcttcaccaagctggccgggctgaatgtggcagacggtctgcgtacctggacagtcatcaccacgttgctcggcaccctggggttcctgatgaccctgctgatctggccatttgtctgatttctaggagcttacatgcctcgttttgctgccaacctgagcatgctgtacccgcaatatgatttcctcgagcgcttcgctgcggcgaaagccgatggttttgatgccgtggaatacctgttcccctacgattacagcgccgccaccctcaagcagcgcttgagtgataacggtctggtccaagtgttgttcaatgcaccgccgggtgactgggcggcgggtgagcgaggcattgccaccttgccggggcgcgaggccgagtttcgcagcggcttcgaccgtgccctggaatacgccgcggtgctgggcaatacccgtgtgcatgtgatggcggggctgttgccgtcgccaagcctgcgcgaacgccatcacgccgtgtacctggagaacctggcctatgcaagcgctgcggcggccgaggttggcgtgacggtgttggtggagccgatcaacccccgtgacataccgggcttctttctcaatcgccaggaccaggcccaggcgatctgtcgtgaagtcggcgcaagcaacctcaaggtgcagttcgactgctatcactgtcagattgtcgaaggcgatgtggcgaccaagctgcgtcgtgacgtcgacggcatcggtcatatccagattgccggagtgcccgaccgccacgagccggacctgggtgagctgaactatgggttcctgttcgagctgatggaccagttgggctacaccggttgggtcggctgcgaataccggcccaaagccgatacctcggctggcctgcaatggttgcgggactggaaggcccgctgatccgaaacatcccctgcataaccggtaagcaggggggccacaataaaaacaaaaataacgggagttcccctatgcagcacttcaccgtccggcctgctccaggctggctgtttgcgttgtcttgtgtaccttcgatgctctgcgctgcaccattgccatcggcgacggagggcgattgggtcgcgcccgagttcacttttcacacgggtgaaaagctgaccaacctgaaattgcattacctgacgctgggcgatccggctcacccggcggtcctgtatctgcacggcacgtatcgacctggcagcgacgtgctgggcaaggatttcggcggtgagttgttcgggcctggccagccgctggacgccagcaagtactacattatttccaccgatggcataggggtcggccagtcgacgaaaccgtcggatgggctgcgcgccacgtttcccgcctacaactatgccgatatggtccaggcgcagtatcgactggtgaccgagggcctgggggtcaagcacctgcgcctggtcatcggtaattccatgggcggcatgcagacctggatgtggggccagacctggcctcagatgatggatggtctggtgcccatggcatcgcagcccacacagatgtcatcacgcaactggatgatgcgtcggctgctggtggagtcgatcaggcaggaccctgcgtggaatagcggcaattacacccagcagccgccttcgttacgtctggccaatgcgctattcagtgtaggcaccagtggcggcaccctggcttaccaggcggctgcgccgagcagagcgctggccgacaagctggtggacgagcgcctcaacgctgcgcaaacggctgacgccaacgactttatctaccaatggcaatcgtctgccgattacaacgctgcccccgggctgggcaatatccaggccccggtactggcgatcaattcggcggatgacgagcgcaatccgcccgaaaccggcactctggaggcgtccctgaaacacatcaaggacgcgcgtttgctgctgatcccggccagcgctgagacgcgcggccatggcactacggcgatggcgaagttctacacccgggagttggcggcgttcatgcaacacaccgagcaggtacgccaggcgcgttaacacgccgtcgggtcacgccggcgttggatcgcccggcagcatcagttcgatgccgcgcttgcggataccgtcagcggccgccggggccagggcgtcgtcgctgatgatcacatcgaacggttccagcccggcgatgcggtacatgctgaaggtgccgtacttggaactgctggccaccagtactacttgagcagctgattgcatcgccacttgcttgacctcgaccttcagcgccgagggggtggtgatgccacggtgcaggtcccaggaactggtggacacaaaagcgatatccgtgaccacctggcgcaaagtcgccaccgccagcccgccgacgcaagagtgattgtcatggtccagttggccaccggtgtggatcaccgtgacctggggcgcatccatcagggcctgcacgatcccgaaatcgttggtgaccaccgtcatccccgaaagcgccttgatataggggacgatctccagggtgctggtgccggcatccaggtacaccgtcatgtccgcgtgcagcaaacgtgctgccagtcgtgccatcgcctgcttttgtggcaattccactacggctttggattgatggctcggctcgctgtgcaactggctggcgatcctgacgcccccggtgacggagtacgcccggccttcctgttccagcagtgcaatgtcacggcgtacggtcatgtgcgagcagtcgaacatctccatcaactggtgcacgctcatcacctgatgcttgcgcaactgacgcaggatttgctcgcgacgctgctcgggaatcatcggcgtgctgctgtcgggggcagtgtccttgggggtgggcattgaggctccgggtcggtctgggggctggggcacatagtagcgaatatgcgttccgaggtgatgcacttcagtcagtcatcagtgcgtcatcgactgtgtccaggtgcttgaagcgttcgatcagaaagtcaatcaggctgcgcacccgtgccgacaggtgcagttgttgcgggtataccgcgtacacatcggcgcgggtgggggtctggtcctccagtaccaggcgcaggcgcccgctgcgcacgtagcgagcgatgtcccattcggcgcgcagtagaatcccgtagccctccagtgcccagttcagcgccacctcgccgtcgttgcagcccagggcgccgtgcactttgatgttgtccgtatgcccgccgtgggtgaacgaccacacgccatacggcgattcgttctgacggatgaagatgcagttgtgctggtgcaggtcggcgagcttttcgggtgtgccgtatttgtccaggtacagcggcgaagcgcacagcaggcggcggttggaggcgatcttgcgtgcatggaacgccgcgtccggcaggctgccgaagcggatgccgaggtcgaaaccgtgggtcgtcaagtccagcgggtgatcgctgatttccagctggatttcgacctccgggtactgcgcaaaaaacgctgccagggccgggccgatataacggcggccgaaccccagcgaggcattcacccgaatcaggcccttgggcgtggcgcgactgctgctgagcacctgctccagttcgtcgatctgggtgaggatgcgcgccgcatgggtgaaatacagctcaccttcggaagtcaggctcatcgagcgggtagtgcggttgaccaggcgaatgcccaggcgcgcctccagtgccgtcaggcgtttgctcactgccggcggagtcacccccagttcgcgcgcggtggcgaccaagctgcctttgttggcgagcaggtagaaaaacgacaaatccagggtttggctcattcgtaactcaaggttatttatgtagtgatttcgagtcgatcatgctgctttgatcgctacatatactccgatcaccccccgcttggacagcctggctgcggcgggacacaacaacaaacgtgacgaagcggagtgaatgatgagtgcatacaacattgcggcaattccaggagacggtatcggcgttgaagtgatcgccgcgggcgttgaagtcctgcaaagcctcgcgaacaaagccggctttgcaatgaacttcaagcatttcgagtggaactccgacaactacctgaaaaacggctactacatccctgaggggggcctggaagagctgaagaccttcgacgcaattttcttcggtgcagtgggggccttgaacgtgccggaccacatctccctgtggggcctgcgcctgccgatctgccaaggcttcgaccaatacgccaacgtgcgcccggcgcgggtgttgccgggggtgaaaagcccgttgcacaacggcgaccagattgattgggtggtggtacgggaaaactccgaaggcgagtactccggcaacggcgggcgggtgcatcgcggcttgcccgaagaggtggccactgaagtgtcggtgttcacccgtgccggtgtggagcgtattcatcgttttgccttcgacctggcccgcagtcgcccccgcaagcatctgaccctggtcaccaagtccaatgcccagcgtcacggcatggtgctgtgggatgagattttctacgaagtggccaaggacttcccggatgtgaaaatcgacaaggaactggtcgacgccgtgaccacgcgcatggtgctcaaaccgtcgaccctggatgtgattgtggccaccaacctgcacgctgacatcctttccgacctcgccgccgcactgtccggcagcctgggtattgcgcccacggccaacctcaacccttcgcgccggttcccgtcgatgttcgagccgatccatggttcggcgttcgacatcaccggtaaaggcgtggccaaccccatcgcgacattctggaccgccgccatgatgctcgaacacctgggcgagccagccgccgcccggcaattgatgtcagccatcgaggcggtcaccgaaagcggcctgcacacccctgacctgggtggcactgccagcacccgccagatcaccgatgccgtcatcgagctgatcaaccgctgattcacgggagtactgcggcacaacgccaagggccggcggtcacgtccgcccccctggcatttcctgacaacaataagaatcagggccctgtcatgaaaagaatatttggcaaactctatgtgcaagtcctcatcgcagtcatcctcggtgcgattgtcggggtgcttgtgcccgacaccgggaccgcgctcaagccattgggcgatgcatttatcaaactgatcaagatgctcctggcaccggtgatcttccttacggtggtcaccggcattgccaagatggagaacatgaaagagctgggccgcgtgggttttcgcgcgttgatctacttcgaagtggtatccaccctggccctggtggtcgggctggtggtggtggatgtgttcaagcccggcgccggcatgaacatcgatgtggccaccctcgacacctcaagccttgccacctacaccacggcggtcaagcacgcctcgttcatggactttgtcatgaacatcattcccgacaccctggtggatgcgtttgccaagggcaatgtgctgcaaatcctgctgttttctatcctgctgggcgttgcgctggctgctgtggggccgcgcggtaagccattcgtggacacgctggacagcctcatgcagggcatgtttcgtatcgtcaacatggtcatgcgcctggcgcctatcggtgcgtttggcgccatcgcgttcaccatcggcaagtacggcttcggttcgttgttttccctcggcaaactgatggcctgtgtctacctgacgtgcgcggtgtttgtgatcttcgtgctggggccgatttgccgctacagcggcttcagtttgtggaagttcctcaagttcatcaaggaagagctgttcaccgtgctcggcaccagctcgtcggagtcggtattgccgcaaatgattgccaagatggagagggccggggtgtccaaaccggtggccggcatgatcatcccctcgggcctgaccttcaaccccgacggccaggcgatctactacaccatcgccgcgattttcatcgcccaggccaccaacacaccgttgaacctaactgatcagttgatcgtgctggcggtgttgatgttcacctcaaagggctcggcgggagtgaccggctcaggctttattatcctggcggcaacgctgtcgtcactgggcactattccggtggcgggcatggtgctgctattgggggtagaccgttttatgtcggaagcgcgggcgatcaccaacaccatcggcaatggcgtgggcaccatggcgatcgccaagtgggtgggggcgttggatacggtgaaaatgcgcaaggccctcgacggtgaagttgagagcccaggtgcacattcagaacttgaatcgccccaccagccccttgagctgcccggaaatatccgtcaaccgacctgacccggtctgcgccgaatgggcaaacccttcgaccagttgcgcatcggcatggatttgcgcgatgtgccggttgatctcttcggccacctggtgctgttcttcggcggcggtggcgatctgggtgttctggtcgcggatcgagtccaccgagccacggatcttgtcgaagctgtcgcgggcctgctggatgcgttccacgctggtgtgcgacaccagcaggctgccttgcatctgctgggtcacttcctgggtgcgacgggcgaggttgccgagcaggctgtcgatctcgccggtggagtcggcggtgcgacgggccagggcgcggacttcgtcggcgactaccgcaaagccgcggccctggtcaccggcacgggcggcctcgatggcggcgttgagcgccagcaggttggtctgttcggcaatcgagcggatggtgtcgaggatggtgttgatgtttttgctgtcctgctccagctgctgcatggtctgggtcgagcgttgcaggtcttcgctgagctggagcacgctgccggtggcttcgccgatgtgctgctggccgtcgtgcacatcgcggtagccttcatcggcactggtggcggcggcgctgcaggagcgcgcgacttcgttggcggtggccaccatttcgttgaacgcggtgctgaccagttccaccgcttcacgctggcgaccggcggcctggttcatgttgtgggcgacttcgctggtatcggcggcggcggtttgcaggtcggacgaagcgttgccgatgcgctgcaccaactgggcgatcatgctcaggaactgattgaaccagccggccaggctggcggtttcgtccttgccctgcaccttgagctggcgggtcaggtcgccttcaccttcggcgatctcttgcaggccgtcggccacgccgcgaatcggacgtacgatcacgctggcgaaactggcgccgacaatcgcgaagaccacggccagcgcagcggcaatcgcagcgatcaaccaggtaaggcgggtcgcgccggccatcacttcgtcgcgcttgatcaggccgataaagcgccagcccaggtctttggagctgaccatgttggccatgtaggccacgccatcgatgtcgatctggctcacgccgtcgccgcgcttggccagttcggcgtagttggggccaaggtcggccaggggcttgaagttgtgcttggcgtcgctggggtctaccagcacgttgccgttgccttccaccagcatcaggtagccgctgtcgccgagcttgatgttgcgcaccagttcggtgagctgcttgagcgagacgtccaggccgaccacgccgaggatcttgccggcggcgtcggtgacggtgtgcacggtgccgatcagcgtcacatcgtccggcgcccaatagtaggcgccggtgcgcacggttttacccggcgcggcgatggccgcctggtaccacgggcgtacgcgtgggtcgtagttgttcagcttggtgtcgtcgggccagctggcgtagccgccgtcggcgaggcccagggacaggtaggcggtgctcggatggctcttggcgaactggtcgaaaatctccagcagcgcggtgttggtgggggtgagggggatctgtgcggcgtcggcgccggcgtagctcttgaggtccttggccgcgacaacgcgcgggtccttggccacatactcgacgttctggctgatgccctcgaagaactgcttcatgccattgtcgatctggcggatctcacggccactgctgtcgaggaaattggcctgggccccctcgcgcagattcaacacgaccagcacggccaccaggataaccggcacgcacgcgatggcggcaaatgcccaggtcagcttttgcttgatattcatgacttcacccgcgggtatttataattttggcaaggagaaaacagtagcgtcgagcgtcgcatgtgttgtttttagggggtgtggccatgcgtaccccctgtatatcgactgcgcgggcacgcacttgagggccgagagaaggtttaaccgatgcgttcgccacccagcgcatcacgctgcatcgactgcaggtttttctcgatggtttcgcagatggtgtccatctggatctggtgttcgctggagttgaacgggctttgcaggtcggtgccgatgcgctcgatggccagcagcatgaaacccaccaccgtcgaggccagcggggtgaaccagcccagggactccaccaggcccaccggtacgatcaggcagaacagcgagataaacagccgtgggaagtacacgtaagggtagggcagcggggtgttggcgatccgttccatgccgccctgggcgttggacaagtccaccagggtcgactccagccgtgccaggcgaatgctgtcaaggtgaccgaccttgtactcgcgggccagcaacgccgctgaaccggtaaggatatcgttggcaaagttgttggtggcgccgttgcgcgcaaactcgtcaccagggataaacgcgcggacttcttcggggcaaggctggcccttgaggtgcgcggccaggcaattcacataggccacatgacgacgcagcagggtggccttgaccgggttcacttcgtcgtcggggtcgtccagcagggtcagtacctggcgcgcaaaactgcgcgagttgttgaccatcgcgccccacagtgtgcgggcttcccaccagcggttgtaggcactgctgttacggaaactgatcagcaccaccagcgccgaacccagcagggtcaggggcatcagcggcagattgatcttgtaggtgagaaacaacatgaagtccacggtgacggcgacgtcccacagcagcagccagaacagcgcccagccaacgtagcccatggtcttgatgatcaggcggtactttttgaggatggcggctttcaaacggggacctcgcggcgaacggtaagcaagagtgcttaagctcggacgcgggtggcggtgaaaggttcgccccatggcctgaatcgtttaagtggtgcgcaccggctcccgtgagagtcttcgcagttcttccagtgccgccaggattcaatggcatcggcgaacaggtcgattgaacagtttcatcacaacgcttggatatatttaaaggcagcgaagcaccgcagctgtcatgggcgtgtatgagtgggttgctttagggacgccaatacgttttggaacaattttggtagcgatgatgtctgtcgggttactcgcgatacattgcgctcgaggcaaaacgccatcactggtggtgtttacgacgtgagttgttgtgagacctggttgcagaagtgctgcgccatcgatcagtgaattccagtaggttgatcagggctctttctcatgtgcgtcagttcgttgaagtgggcgttggatcattccgcgcaggtgttggaacgtcacggggaatttgaatgcagtattcgcgcgcactacgccattctgctgggtccctattcaaaacgaccgtttttctacaagacagcgctgaagttcaaccgtttgatggtgtctttcacgctgctgagtgaatatttctccaagcccgcgccattgttgtccgacgtgaaagcgttctgcgtggctcgcggtttctgttccaggaacagcctggagtcgatcttcctgctgttcagggccctggggttcatgaaggtcgctggccaccctgacgacagccgttttcgggtgttcagcccatcgccgcaggcttgccatgaagtcaggtcgatgctcaattccgtggtgcagccgctgggaccaatgtgccccagtgaagcgcaggtccagcggatgagtgagttggacgaccgagccttcctggcactttatttcaaaggttttgccacccttctttcaaataagctgaccatcgatgtattgctgccggaatgtgactggctggttaaccgtgatgccggacatatgctgatgttggcgatttataacgatgcctgttccttggactgtcagggcgcaagtttcaggacgtcttcttatctttcactggcgacgcgactttcagtgtccaagacccatgtgattcgtctggttcaggagggtgttgaaaaaggttgctttaaagtgcattccaagacgcagttggaagtattgccgccctttgtaaagttggtgcgccgtttcatggcgtattcatttgcaatcaccctgcttagtatcgagttgggccaagccaggaaaatataggcaacttatgcgcagggagtgttgagatgccggctgacttaaagctcaggccaaggatgcagaggttattgtcgcccgctgttgcccaggcggaatggataggcctgattgcctggtggtgggtgctcttggtggatccggtgctggagttcgggtggtacaccgtgctcattaccgtctgtttgacagcgttgtgtcgatttcaccggcggttggccaatttcctggcctggcgggcgttcggtgtggtctatatggcggtgttggccgggggctttgcgttggtgatgcagaccgatcaggcgttgcaggtatttgctctaccgctggcggtgattctggtgctgagcagtgccttgctctttatcgcagtccaggatttcttgataggcgctgcattgatctggtcgatgctgtggccagctgttcatatgtcgatctacgccggggttgaggtttacctggtgatgttctgcctggcgtcggtgtcgatcggcttcatcttgaattattcctacttgaagaacctgcgttccgtattgctggtcgagagtgagttccgggaactggcagaaacggattacctgacctccatcctgaaccgacgggcctttatcgagcgtttcgcccaagtgatcgccgacggccagggcggctacttcatgatgttggatatcgatagcttcaagctgaaaaatgaccagtttggccatgatgtcggcgacaagattctctgtgcgatggctcattgcctgaaagccactcctggcagcgacagcttcggtaggatcgggggagaggagttcggtgtcttgctggtgggtgatgacccttgggcggccacggattttgccgcgcgcctgctgcaagccattcgtggcagtgtcccgccaccccatcactacacgtgcagtgccggcatgacgcatttctcggcgggcgccgatatgtcagcggtactcaagtgcgccgaccgcaacctgtacgccgccaagcgcaatggcaaggactgcgtgtacctggatggcgagccggtggctgcttcccggtgaaacgcaaagacgggcctcagtgctgggccagaatgctcgcaagcaagccgggaaagcggccttcaagatcttccgcacgcaacgcattcagatgagtggtgcccacgctgcgtgtctgcaccaacccggcatcgcgcaacacccgaaagtgatgggacatgctcgacttgggccgcccgccgtccagttcgccgcaggtggcctctggcacgccggccaggcagcgcacgatttccaggcgcaccgggtcactcagggcgtacagcacgcgctcaagggtcaggtcttgcaggggggggtgtttgaaggctcgcatgaaacgaatcataacagggggctatcgttgaataccatagttcgattaccatcgaactatcgaatcaaccacctgctcactggagtcgcctcatggccgcattgttcgaaccgttccaactaaaagatgtcaccctgcgcaatcgcatcgctatcccgccgatgtgccaatacatggccgatgacggcatcgtcaacgactggcacctcgtgcacctggccagcatggcccgtggcggcgccggcctggtggtggtcgaagccactgctgtcgcgccggaaggtcgtatcactcccggctgcgcgggcttgtggagtgatgcgcatgcccaggcgttcgtgccgatggtccaggcgatcaaggccgctggttccgtgccgggcatccagatcggccacgccggccgcaaggccagcgccaaccgtccgtgggaaggggatgaccatatcgccgcttccgatgcccgcagttgggaaaccattgcaccgtcggctatcgccttcggcgccaacctgccacaggtgcctcgcgccatgaccctggacgacattgcccgggtgcgccaggacttcgtcgacgccgcccgccgcgcccgcgacgccggttttgaatggatcgagctgcacttcgcacacggctacctcggccagagtttcttctccgaacactccaaccagcgcaccgatgcctacggcggcagcttcgacaaccgcagccggttccttctggaaaccctggccgacgtgcgtgaagtctggccggaaaacctgccgctcaccgcacgtttcggcgtgatcgagtacgacggccgcgacgagcagaccctcaccgaatccatcgaactggcccgccgtttcaaggccggtggcctggacctgctgagcgtcagcgtcggtttcaccatccccgacacccacatcccgtggggcccggcgttcatggggccgattgccgagcgtgtacgtcgcgaagctggtatcccggtcacgtcagcgtggggcttcggcacgccgcaactggcggaaggtgcgttgcaggccgggcacctggacctggtgtcggtggggcgtgcgcacctggccgacccgcattgggcgtattttgcggcgaaggaactgggggtcgagaagtcctcgtggaccttgcctgcgccttacgcgcattggttggaacgttatcgctgaggcggtagccggatgatggaagccactcccaggagtggctttttttttgcgtcgtcttttgtagcacgtcgatacatggcggatactcaaaaaaacatcaatgagaatggatatcaattgttaatgatttgacatatcatgcgcgccaaaataactggctgatatgccgccccatctggctctttcactaggttcaactcatgcgtcgtaccctgctttccgtgtgtgtgcttcaggcgttttcccccttgagctgggcggaggtcgaaccggttgaaaaagccgccatcgagctgcaagccaccagcgtcaccggcacggccgactatgaaaccgcccagggccccgtgcagggctatcacgccacccgttcagcgagtgcgacgcgcaccgacacctcgatccatgaaaccccgcagtccatcagcgtagtgtccaaggcggtggtcgaagacatcggcgccactcgcctgcaggacgcgctggactatgccggcggtgtcggccgcgccaacaacttcggcgggcagggtctcactaccttcaccgtgcgcggctttaccaccggcgagttctaccgcaacggtttcccgatcaaccgtggctacccgaacatgccggatgccaacaccatcgaacgcctggaagtgctgcgcggcccagcgaccatgctctatggccgtggtgatcccggcggcaccttcaacgtggtgaccaagcaaccgttggccgaacgcacggtcaccctcggcagccaattgaatgaccagggcatgaagcgcggcaccctggacgcctccggcccgttggacgaagagggccgcctggcctatcgcctgaacgtggtgggcgagggcggcgacaccttccgcgaccatgtggaaaccgaacgctacggcatcaccccggtgcttacctggcaggccagcgacgacaccaaggtgatcttcgaaggcgacttcatgcgcaacaaccacccgctggaccgggggctgacacgctttgctactcagaaaggcacggcttcccgcgataccttctggggcgataaagacgtcggcaagctgcataacgacaacagcatggcccagttgcgtttcgagcatctgctcaatgacaactggaccctgggcggtggtttccagtggttggacggcaccttgcagggcaacgccatcgaggccaacagcctggctgccgatggccacacgctcaaccgcaacttcaactaccgcaagctggaatggaccgacaaggacacccagctcaacctcaccgggcatttttccacgggtggttttgatcacaccttgctgactggcgtcgagtttgaggattacgactacaagtcgatcatccagcgttcgtccgccgcctacaccagcgatatcttcaacccggtctacggcaagccgcgcccggcgcttaccagcacgccgactcatgacaaggaaaacctcaagacctacgccgcgttcgtccaggaccaggtggccctcaccgaacgcttgaaggtgctggcgggtgcgcgcttcgaacgcttcgagcaccagtacgagacctacgtgaagggcgggcaaagctgggaggccagcgacaacgcggtcacgccccgtgtcggcgtgacctatgacctgactgagaccctggcggtctacgccgacgccgcgcgttccttcaagccgaacaccggcgccagtcgcgacggtgccggtttcgagccggaaaagggcaagtcctatgaaatggggatcaaatgggaagggctggaccgtcagttgagtgtggacgcagcgatctaccagatcgacaagaagaacgtgttgaccaccgatcctgaagactccaactacaaagtcgcagcgggtcaagtgcgcagccgcggcttcgacctcaacgtcgccggcaacctcacccctgaatggcgcgtgatcggcggctacgcctatgtcgacgccgaagtcaccaaagacaacaccatccgcgtcggttcacacctggccaacatcccgcgtaacagcttcagcctgctcaacgtctacgaattccaggacggtcgcctcaaggggctcgggctgggcgcgggcgccaaatacgtcgatgaacgtgtcggccagacctccaacaccgccttctccatggacgcctacaccgtggtagacctgctgggctactacaaggtcaatgacaaggtgcgcctgaacctggatgtgaagaacctgttcaaccgcgattttgaggaaggcgcgttcggcaacttctacgcctacccaggcgcgccacgcacggtgcaggtgggcatcgcctacaccctgtaaaaccggggcggtgtgcaatccctctgggtgattgcacaccgtattcctcagccctcgaacactgggtgcgacgacctttcaatcgccaccatggcatcggcctggctcatcaaccccgactcttccagaatcgacaacagcgagcgcccttgcgccaccgattggcgtgccagcttgctcacacgggcgtagcctagctgcggaaccagcgcggtggccacggccattgattgagccaggtgttgttcgttacgttcggcatcggcggttatcccactgatgcacttctcgcgaaaccgttggatgccttgggtcagcagcgcaatgctgtcgaacacgcgggacgccaccagcggctcgaagtggttgatctccaactgaccggcctggaccgcctgcgccaccgccacatcattgccgatgacggcgaagctcaactggatcatcgccatgggcaacaccgggttgaccttgcctggcatgatcgacgagccggcctgggcttcgggcagcttcaattcgccgatcccaccgaccggcccggaggacagcaaggtcaggtcagttgcgatcttggccagggacgcggaaccggtgcgcaactcagccgaaacccgagaaaacacatccatgttctgcatcgcatcgaaggcgttcgaggggggctggtactcaatgccagtgacctgtaccaagtgctgatacaccgcggcgcgataagcgggaggcgcaccaaacccggtgccgatcgctgtgccgcccagcggcagggtgcgcagtgtgtcgcgcacgccagccagcgcggtcgccaggcgatgggtgagggcagcgtacccggaaaacagctggcccaggcgcatcggctgggcatcctgcaggcaggtgcggcccaggtgcagaatatcggcaaactgcacggctttctggtcgaagcgcgtagccagttgttccacttcatcgatcaatggcccgagcatcgcatgtgtcgcgatcttcaatgccgcagggtacacatcattggtcgactgcgaggcattcacatggtcattggggtgcaccacgtcatacgaacccgccgcgtggcccatcaattgctgggcgcggttggcgatgacctcattgaagttcatgttggtggacgtgccgccggacccttccagcaggtcaacgatcagcgagtcgtcgcaccggccggcgatcacttcggcgcaggcttgcacgatggcgtcgcactggggctgggcaagtacgccgcaggcgcggttggccagtgcggccgcccacttgcactgggcaaaggcatcgcggaaggccgggtaataagcgatggtcagcggtgatacgctgaggttgtcgaacccgcgcaccgagttcaccccgtacagcttgtctgccggaatctgtacgtcgccgacgtaatcggtttccagccgtgtagcaacagcatcaaaaatactcacgagcatcaccctcatcaaattggattaacgcctccacccctttgtccagggccgtgagcctgggcaggaaggagtggcggatcacatcacgcgccgtttcgcacgcatcggcgaaaaaggcgctgtattcattgcgtcgtgctaccaggtaaagcgagcgttccagttgcaggtccggtgtgaggtgcgcggtcacgttgtcgacccaggcactggcctgcaaaaaacacatggggctggtaacggcccaaccgatgccttcggcgaccatcgacgtcagtgcatcggcgttatccagctccaggcggttgggcactcgtacgttcaggctgcgcagatgacgctcgatctgcagccccacctgggacatccggttgaagcgcaccaccggcagcacattggccagcgcgcgtacgtcctcgaccgtgtggatatcgcagcgcgcttgcctgggcgtgataacaaagtacttttctgaaaacagccgatagcgaatcacgtcattggcgtccatcaacgggtcgctggtgacgatcaggtccaggtcgcgccgcaacagggattcaccttgttgcgggctgagccctgtgcgaatggacaactgcgcgaccttgccgagcaattgccgggtgaacaccgacccgcaggtggcggcgaaggagtccaccaggccgatgcgcaggtcggggttcacaccgcgcccggcgtcgatcacttgtgccttgaggtgggacagttcctcgctcaacaccgagccccgattgcgcagggcaaccccgaatgcggtgagggccatgggccgggtggtgcggtccaccagcaccacccccagttcctcctccaattgacgcaccatctgtgacacgccggactgggaaatacccatgcgcgcggcggccccggacatgctgccttcctcggcaaccgcgatgaacacctggactgcatacatgtcgatcagcctgttcgcagacatcctcaacctcacttgatggtgttattcaatggcaaccttggcgtccgtccgaagaggatcgggcgtgacccccgacaagtcttccttgctggtttctggcgcaaacacgtggcagaacacgccgccgaagaccagcacgccaacgcatacgcccaacgccgcatggacccccacgtgctgcaccgcgactggcagcaggaacgtcgccaccgccgagccgaaccggctggccgccacggccaggccgatccccgaggcccgcagatgggtggggaacaattcgggtgggtagacgaactccaggttgaccgccgccgccatcacacaggcaaaaacgccgaaggcgaggatggtgcccagggggccgaaaccggcgtaggccaatactgccaggcccgcagcactcaagtagaaggtgccgaccaggaatacgcgccgggacagccgatcaatgaccagcagaccgagcagtgcgccgagcaatagcaacacgttgtagaccaggccaccggcaaacttgtcctgcacgttcagggcttccaggactttgggtgcgaatgtgccgagggcgaagaacggaatcacctggcaggtgtagaacacgcaacccaccagcgtatttttgcgccagcgcgggctgaacagttctgcccagctgccacgctgcttgtgcccattggccggggccacgggtgctggcaggaacacatgcgggccgaacttgctgcgcacaatggccatggcttcctggctacgcccgcgagccatcaaccagatcggcgattccggcacgcccatgcgcaagggcagaatcaacagggctgggacgccgctgagggccagcatcacgcgccaggcatccgggccgatatcgcggatggcaaagcccaccagatacgccgccacatagcccgccgcccaagctgccgctagcacactgagcaggcgtccccgatagcggcgcggggcaaattcggtcaccagtgacttgctcacgacatagtcgaagcccagcaccagccccagcagcaaacgcagcgccagcaactgctcgggcgaggtgacaaagaactgcgacgcagagatgacggcgaacaacagcatgtcccaggcgaagattgcccgccggccgaacttgtccgcgataggcccggccaacaggctgccaaggaacagtcccgccaaggacgcggcgcccagcaagcccatccataatgccgtcaactgtaacgggccggccgccatgctgacggcgatcccgataatgcccagtacgaaaccatcactgaactggccacccgtgccgctgaataccgtgcggatatggaagcggctcagcggaaggtcttcgaacgctacttgaccactcattcgtctctccacttgcgtttttatagttgtgggaaccggtgcatcggcaccggctgagagcgagtctagggcgacagcttcacgaaatcagcaggtgccctgtgagtatcaagatagctgatactgagggccgcttttcttgaacaggggacaaagatatgagcgagtacgcgcaactgactcacgagcttgaacaggcacaaagtaggacccacatcacagctgcgacagatggcggccaataagcatttacgtccacccccaatcgatgagaaaagcacgtccattccctcggatatggacatcgcatgcctcgttcaaccctcatcgttcgtgtattcgtcgcgctgctggccagtcttgcgctcgggtatatctggatcatcgtcagcgccaagctggaaatcggcggcgccagcccgaatcaacaacggctgggcacactgccgggcgtgcggccacacgcggtcagccaggattgcaccggagtgaaggtgaccgcccagggcacgtggctggtggggcgggtgacgaatgaatatgaacagctggaaccctcaagcgagcgggtggacttgaatggcttgctcgacggcgaactgcgttcggagccggagaccaccgtggttgcgcgtctgggggctgacggggtgttcaagcaggtcgcccaggtcagcggctcggcctgcctggtggcgagtgcggagggcgcgcgcgtgtttctgctgagttcgctctatcgacccaacgatgtggggggccagaacgcggtgttccgcagtgatgaccagggcaagacctggcgctgggtggccgacgggtttttccccgaggtgagcggtgtggccaccctggtttcgccgtacttctataatcaggacgaggtctgggcctcgcgttgggccgatgacgtcgagccgcaggccggggtgtattactccgccgacggtggcgcccacagcacgccgatcacggtgccacaaccgctggcggtgacccaagactacgcccacagcctgcgcccggatatccaggagtggcgcgattcaaccgaacagctgacccacgtattgcaacaggatgcgcagcacgcggtgatctgggtgtcgcaacgcttctggggcagccatcccgatggcaagagcgacaacctggcgatcggtgtcaccactcgcgtgcagttgaagcgcacggccggcacgtggcaagtcgaggatattcagcgggaaaacggcctgtacatcagcgagcttgcggacaacggcgccgggcgcgtgatcggcctgatcgaccaggggccccatgggcgcgcggtggtcgccgaattgaacaccgcgacgctggcctggaaaacggtgggcgacttgcccagtgtgttctcgcccttgagtgccgatacccaggcgcgtgggctatgggtagggcgcaacagcctggtggtcaatacctacagcgatcataagccgccgcgttggctgtactggtggagcgaggcgagtatctccgccgatgcggtgttctattcgacggactggggccattcctggaagcgtctgtcgctggacgggtacatgggcgtgcgcgggtttgacggtgccagtgatcgggtgttctggagcaaacagaattacgccgacgacaccctcattcaagcctatggcctgcgctgaatcgcctacaacggcgtcaacacgttcatcaccgtatccaacgccacccgcgtgtcatccagttgcaccagcgacgcatgccgcgcgccgagggcgtcgcggttctggatcgcggtgaggatcgccttgtgccggggcaggctcaggccctggatgtcggggcggcggttggtgatgttgatcgactcgcgcaacggcagcgacagcatgttgcacatgtaggcgagcaagtcgttgcgcgtggcgtcggcgatggcgcggtggaagtccaggtcggcctgcagcagctgttcgtgggtctgcgcggtttccatgccctggtaggctttttcgatggtggcgatgtcttcgtcggtggcggtggtcgcggccatggcggcgatctccggttcgaggatgcgccgcacaccggccagggtgttgaagaactcactgtggggtgtggactgcatcaaccaggacaacacgtccgggtctagcaggtgccacttcacgcgaggccgcaccaccgcgcccacccgtggcttggaatacaccaggcccttggcgctgagcacccgcgtggcttcgcgcaacaccgagcggctgacctggtactcctcgcagagcgtggcctccatgggcagccgttcttcgggcttgaagcggccggaaacgatgtgcatgcccaagtcctgaacgatctgggcatgctggctcttgcgcggcttgggcggctggtgatccatgacgacggggaggctctggcttaaagacgcggcatcatagcatcccaattagtgggaatgccgtgggacttccgccccacggcaacccaccaggaagtcaaagtcgcagccctggtcggcctgcagcacatggtcgatgtacagctggcggtagccgccgacgatgaggttctgcggaggcgccaggtctgccatgcgcgccgccagctctgcgtcggggatgtccagatgcaggcggccgttggcgcagtccagttcgatccagtcgccttcccgcaccgtggccaacggaccgccggcagcggcttccggtgccacgtgcaacaccaccgtgccgtacgccgtgccgctcatgcgtgcatcggagatccgcaccatatcggtcacaccctgggccagcagcttggccggcaggcccatgttgccgacctcggccatgcccgggtagcccttgggcccgcagtttttcatgaccaggatcgagttggcgtccacgtccagttccgggtcgttgatgcgcgccttgtacatgtcgaagttctcgaacaccaccgcacggccacggtgctgcatcagctctgggctggcggcggacggcttgagcaccgcgcccagcggggcgaggttgccgcgcagcacgcagatgccgccgtcggcgcggatcgggttgtcgagggtgcggatcacttcgtcctggccgtagatcggtgagtcctgggtgttctcgcccagggtcttgccgttgacggtcagggcattcggatgcgggatcaggttggcttcacccaggcggcgcagcaccgcgggcaggccgccggcgtagtagaactcttccatcaggaagcgccccgagggttgcaggtcgacgatggtcggcatgccacggcccatgcgggtccagtcgtcgaggtcgagttcgacgccgatgcgcccggcgatggccttgagatggatcactgcattggtcgagccgccgatggccgcgttgacgcggatcgcgttttcaaacgcctctttggtgaggatcttcgacagcttcaagtcttcgcgcaccatctccacggcacgcatgccggacatgtgcgccagcacataacgccgcgcatccaccgccgggatcgccgcgttgtggggcagggacgtgcccagcgcctcggccatgcaggccatggtcgatgcggtgcccatggtgttgcaggtgcccgccgagcgcgacatgccgccctcggccgcgaggaagtcatccagggtgatggtgccagctttcacctgttcgctgagctgccacaccacggtgcccgagccgatgtcctggcccttgtgcttgccgttgagcatcggcccgccggtgaccacgatggccggcacgtcgcaactggcggcgcccatcagcagggccggggtggttttgtcgcagccggtcagcagtaccacgccgtcaatcgggttgccgcgaatcgcctcttccacgtccatgctcgccaggttgcgggtgagcatggcggtggggcgcaggttggattcgccattggagaacaccgggaactccaccgggaagccgccggcctcgattacgccgcgtttgacgtgctcggcgatctggcggaaatgcgcgttgcacggggtcagctccgaccaggtattgcagatgccgatgatcggcttgccatggaactgatggtcggcaatgccttggttcttcatccagctgcggtacatgaagccgttcttgtcggcggtaccgaaccactgggcggagcggaggccgggctttttatcaggcatgatcgattctcttattgtatgactatatgttctatgcgtgcttaaacataagcgcaaaaacgctgctttggaagagttgttttgcaaatagtcatactatatagtcgggttcaactgaggtatggccctggcggattttcgcgagaggcgtcccccgagcttctataaaaacaacaatcggagatcgaccccatgagccaggaactgcggcttattcggcgcatcacgctgaaactgattcccttcctgatcctgctgtacctgatcgcctacgtggaccgctccgccgtgggcttcgccaagttgcacatgggcgccgacgtcggcatcggcgacgctgcctatggcctgggcgcggggttgttcttcattggctacttcctgttcgagatccccagcaacctgatgctcgaccgcttcggcgcacgccgctggtttgcgcggatcatgatcacctggggcgccatcaccatcggcatggccttcgtgcaggggccgcacagcttctatgtgatgcgctttctgctcggcgcggcggaagcggggttcttccccggcgtgctgtactacatcacccaatggtttccggtacgccatcgcggcaagatcctcgggctgttcatcctgtcgcaacccatcgcgatgatgatcaccgggccagtgtccggtggcctgctgggcatggacggcatcctggggctgcacggctggcaatggctgttcatcgtcatcggcactccggcgatcctgctgacctggccggtgctgcgcttcctgccggatggccccaagcacgtcagctggatgagcgacgacgaaaaggcctggctcaccggcgaactcgccaaagacctgcaaacctacggccagacccgtcacggcaacccgctgcatgccttgaaagacccacgcgtgttgctgctggcgctgttctacctgccggtgaccctgagcatctacggcctgggcctgtggctgccgaccctgatcaagcaattcggcggcactgacctggtcaccggctttatcgctgcggtgccgtatatcttcggcatcatcggcctgctgatcatcccgcgcagttccgatcgtttgaacgaccgctacggccacctcgcggtgctctacgtgctgggcgccatcggcctgttcttcagtgccgcgctcagtgtgccggtgctgcaaatggccgcgctgtgcctggcggcgttcgcgatgttttcctgcaccgccgtgttctggaccttgcccgggcgcttcttcgccggcgccagtgcggcggcgggcattgcgttgatcaattcggtgggcaacctcggcggctatatcggcccgttcgtgatcggcgcgctcaaggaatacaccggcaacctcgcatcgggtttgtacttcttgtccggggtgatgctgttcgggctggtgctgaccttggtggtctaccgcctgctcgagcgcaagcacgtgctgcccgccgaccaatttgccgccagtgcccgtggcgccacccgaccttaatccaggagaacagtcatgcgtttagttcagttcgagttgcgtaacggtgaccgccgcgtcggcgtggtcgacggcacccagctgcgcgaagtacacacagcccgcagcgtgcgcgagttggccctcgccgccatcgacgccggcgtaggcctggcgcaatacgtggacagcctgggcctggatgacagctacgactacgcaacgctgctggccgacctgaggattctgccgccgctggaccacccggacccggcccacatgctgatcagcggcactggcctgacccacctgggcagcgcctcggcacgggacaagatgcaccaggccggcgacgacacggcgctgaccgacaccatgcgcatcttccgatggggcgtggagggtggccgtccaccggctggccaggcgggcgtgcaacccgagtggttctacaagggcgacggcagcatcgtggtgcgccccggcgcagccttcccggtgccaccgtttgccgaggatgccggtgaagagccggagatcggcggcctgtatgtgatcggcccggacagcaagccctatcgcgtcggttttgcggtgggcaatgaattctccgaccacatcatggagcgcaagaactacctgtacctggcccattccaagctgcgcagttgcagctatggcccggagttgcgcgtgggcgagttgccccagcatctggcgggcaccagccgtattctgcgcaacggcgaagtgatctggcagaacgagttcctcagcggcgaggccaatatgtgccacagcctggagaaccttgagtaccaccacttcaaataccaacagttcctcaagcccggcgatgtgcacatccacttcttcggcaccgccacgctgtcattcgccgacggtatacggacccaggccggcgatgtgttcgagatcagccaggccgagttcggtgcgccgctggtcaaccgtgtcggcagcagcgctgcggcgttcgaacccggcaacgtcatcaccctttaatggagaaccccatgactcagtttctcggccacaactacatcggcggccagcgcagcgccaacggcagcgtcacgctgaaaagcgtcgacgccagcaccggcgaggccttgccccaggactttttccaggccacgccgcaggaagtcgacgccgccgccaaggctgccgcgcaggcctaccctgcgtaccgcgccttgagtgcctcgcgccgtgcacagttcctggatgcggtggccgatgagctggacgcgctggcggatgattttgtcgagctggtctgccgcgaaaccgcgctgccggccgcccgcatcaagggcgaacgcggacgtaccagcggccagatgcgcctgtttgccacagtgctgcgtcgcggtgatttctacggtgcgcgcatcgacaaggcactgcccgaccgccaaccgctgccacgcccggacctgcgtcaataccgcatcggccttgggccggtggcagtgtttggcgcgagcaacttccccctggcgttttccacggcgggcggtgatacggcggcggctttggcggccggctgcccggtggtgttcaaggcccacagcgggcatatggcgactgccgaacgcgttgccgatgcgatcatccgcgcggccgaggctaccgagatgccggccggtgtgttcaatatgatcttcggcggtggcgtgggtgaagcgctggtcaagcacccggcaatccaggcggtgggctttaccggctcactcaagggcgggcgtgccttgtgcgacatggcggcggcgcgcccgcagccgatcccggtgttcgccgagatgtcgagcatcaacccagtgatcgtattgccccaggccctgaccacgcgggccgacagcgtggcgcgcaacctgaccgcctcggtggtacaaggctgcggccaattttgcaccaaccctggcctggtgatcggtatcgcgtcgcccgcattcaccgcgttcacccagcaagtcgcgcaactgatcggcgcgcaaccggcgcagaccatgctcaacgccggcaccctgggcagctacggcaaaggcctggaaaaactcctggcgcacccgggcatccagcacctggcgggcaaccagcaggccggccatcaggcgcaaccacagctgttcaaggccgatgtgaacctgttgatcgacggtgatgaagtgctgcaggaagaagtgttcggccccaccaccgtgttcgtcgaagtcgccgaccaggcccagctcagcgccgccttgcacggcctgcacgggcaactcacggcgacgatcattggcgagccggccgacctgcaacagttcgccgaactcacgccgctgctggagcagaaggtcgggcgcatcctgctcaacggctaccccaccggtgtggaagtctgcgattcgatggtgcatggcggcccgtacccggccacctcggatgcccgtggcacctcggtcggcaccttggccatcgagcgtttcctgcgcccggtgtgcttccagaattaccctgatagcctgctgcccgacgcgttgaaaaacgccaacccgttgcgtatccagcggctggtggatggcacgccatcccgcgacccgctgtaacgcgcacctgagaacaacaacaatccaggaggcatcatgtcgtgtatcgccgttaccccgcaccgtgcgcaattgggcgagggaccgttctgggacgcgcccacccaggcgctgtactgggtgaatatcgccggcaaacaggcgctgcgcctgatgggcgggcagttgcgggtatggcagttgcccgagcatgtctcggcgttcattccgtgtgaacgcggcgatgccctggtgaccctgagcagcggcgtgtatcgcctcgacctggccaccgaggccctgaccctgctgtgcgtggctgacccgcaaccgggcaaccgtggcaacgaagcacgctgcgatgcccagggccgcctgtggctgggcaccatgcagaacaacatcggcgagcagggtgaagacctgcccatcacccggcgctccggtggcctgttccgtatcgatgccgatgcgcaggtcacgccgttgctcagcggcctgggcattcccaataccttgctgtggagtgatgacggtcggcaggtgcatttcggcgacagcctggacggcacgctgtaccgccacgctatccagccagacggccaactcgaatccgcgcaggtgtggttcggtccccacgagcgtggcgggccggacggttcggccatggatgtgcagggctatatctggaatgcccgctgggacggcagttgcctgctgcgcctcacgcccgacggcaccgtcgagcgcatcatcgaactgcccgtcagccgccccaccagttgtgtgtttggtggcccggacctgaccactctgtacatcaccagcgcggccagcccgttggatcaccccttggatggcgcggtgttggccatcgaggtcgatgtgcctggaaaaccctgtcatcgctttgccggataagtccccgtttaaaaacaacaacaaggagtcacccgtatgaatcgtcgtcgtggtttgcgttccctgtgctgcgccgctgtggcggtctcggccatgagcttgagcgggctgttgctggccgctgaagaagtgaagatcggtttcctggtcaagcaggccgaggagccgtggttccagactgaatgggccttcgccgagaaagccggcaaggaacatggcttcaccgtgatcaagatcgccgtgcccgatggcgagaagaccctttcggccatcgacagcctggccgccaacggtgccaagggctttgtgatctgcccgccggatgtgtccctcggcccggccatcgtcgccaaggccaaggccaacggtttgaaagtcattgccgtggatgaccgctttgtcgacgccaagggcaacttcatggaggacgtgccgtacctgggcatggcggcctttgaagtgggccaaaagcagggcgccgcgatggcggccgaagcgaaaaaacgcggctgggactggaaggacacctacgcggtgatcaacaccttcaacgaactcgacaccggcaagaaacgcaccgacggctcggtcaaatccctggaagaggccggcatgcccaaggaccacatcctgttcaccgccgccaagaccctcgacgtacccggcagcatggacgccaccaactcggccctggtcaagctgcccagcggcgcgaaaaacctgatcatcggcggcatgaacgacaacaccgtgctgggcggcgtacgcgccaccgaaagcgccggcttcaaggctgccaatgtgatcggtatcggcatcaatggcaccgacgccattggcgaactgaaaaagcctgaaagcggcttctttggctcgatgctgcccagcccgcatatcgagggctacaacactgcgaagatgatgttcgattgggtcactaaaggcaccgagcctgcgaaatacacggcgatggacgaagtgacgctgatcacccgcgccaatttcaaggacgaactgaccaagatcgggttgtggcaatgaccgctgccgtcctgcagtttgacggcatcggcaagacctttcctggggtcaaggcgctggatggcatcagcttcagcgcccaccctgggcaggtgcacgccctgatgggcgagaacggtgcgggcaagtcgacgctgctgaagatcctcggcggcgcctacattcccagcagcggcacgctgcggatcggcgcgcaggccatggccttccgaaatgccgccgacagcattgccagcggcgtggcggtgatccaccaggagttgcacctagtgccggaaatgacagtggccgagaacctgttcctcggccacttgccctcgtgttttggcgtggtcaaccgggggctcctgcgcaagcaggccctcgcgtgcctcaaggggctggcggatgaaatcgaccctgccgagaaactcggacgtctgtccctgggccagcgccaattggtggaaatcgccaaggcgctgtcccgtggcgcccaggtgatcgccttcgacgagcccaccagcagcctgtcggcgcgggaaatcgaccgcctgatggcgatcatcacgcgcctgcgcgatgagggcaaagtggtgctctatgtgtcgcaccgcatggaagaagtgttccgcatctgcaacgccgtcacggtgttcaaggacggtcggtatgtgcgtacgttcgaggacatgagcgctttgacccacgaccaactggtgacctgcatggtcggtcgcgacatccaggacatctacgactaccgcccgcgtgagcacggcgaagtcgcgctcaaggtcgatggcctgctcggtcccggcctgcgtgagccgatcagtttcagcgtgcgcaagggcgagatccttggcctgttcgggctggtcggggctgggcgcaccgagctgttccggctgctcagcggcctggagcgcgccagtgccggcagcctgcatttgtgcgggcaggcgctgcaactgcgctcgcccagggatgccatcgccgccggcgtgctgctgtgcccggaagaccgcaagaaagagggcatcattccgctgtccagcgtcgccgagaacatcaatatcagcgcacgcggtgcccactccaggttcggctggctgctgcgcgagggctgggaaaagggcaacgccgaccagcagatccaggccatgaaggtcaagacacccaacgccgcgcagaagatcatgtacctgtccggtggcaatcagcagaaggccattctcggtcgctggctgtcgatgccgatgaaagtgctgctgctggacgaaccgacccgtggcatcgatatcggcgccaaggccgagatctaccagatcatccataacctggcggcccagggcattgcggtgattgtggtgtccagcgacctgatggaagtgatgggcatctccgaccgcatcctggtgctgtgcgaaggcgcgatgcgcggcgaacaaacccgcgagcacgctaccgaatccaacctgctgcaactggccctgccgcgcagcgtggcgaactgagagacgactatgaccactcaacacaacgtgctgcccacggcacgcaagcccctggacctgcgggccttgctggataactgggcgatgctgctggcggcagtgagcatctttttgctgtgcgccttgctgatcgataacttcctgtcaccgctgaacatgcgtggcttgggcctggcgatttccaccgtgggcatcgcggcctgcaccatgctgttctgcctggcgtcggggcatttcgacctgtcggtgggctcggtgatcgcctgcgccggggtggtggcggcgattgtgatgcgcgacaccgacagtgtcctgctcggcattggcgccgccttgctgatgggcctgatggtggggctgatcaacggtatcgtgatcgccaagctgcgggtcaacgcgctgatcaccaccctggcgaccatgcagatcgtgcgcggcctggcgtacatcttcgccaacggcaaggcggtgggtgtgtcccaggatcagttcttcatcttcggcaacggccagttgctgggggtgccggtgccgatcctgatcacgatcctgtgcttcctgttctttggctggctgctcaactacaccacctacgggcgcaacaccatggccatcggcggcaacccggaagcggcgttgctggcgggcgtgaatgtggaccgcaccaagatcctgatctttgccatgcacggggtgatcggtgcgttggccggggtgatcctggcgtcacgcatgacctccggccagccgatgatcggccagggctttgagctgacggtgatctcggcctgtgtgctgggcggggtgtcgttgagtggtggggtggggatgatccgccatgtgattgccggggtgttgattttggcgatcatcgagaatgcgatgaacctgaagaacatcgataccttctaccagtacgtgatccgcggctcgatcctgctgctggcggtggtcatcgatcgcatgaaacaacgctgatcccaagccaaatgtagttccaaatgtgggagggggcttgcccccgatagcggtgtgtcagtgtgcatctctgtctttgacactctgctatcgggggcaagccccctcccacaagtttagtccgcggagaatttgaagacggtgttctgggtgtaggtctgccctgggttcaggcgggtcgacgcaaacttgggctggttaggcgcatccggaaaatgctgggtctccagcgtaaacccgctccagtgctgataggtcttgccagccttgcccttcaccgatccatcgaggaagttgctggtataaaactgcaccccaggctcggtggtaaacagctgcaagcgccgcccggacgcaggatcatgcacctcggccgccacctgcttcacgtcaccctgggtatccaatgcccagttgaagtcgaacccaccctgtttcggctcggcgaatttgagctgcgggtgatcgtccttgatgtgctggccgatcggcgtcggcgtgaggaagtccatcggtgtgcccttgaccggcgccagttcgccggtgggaatcagcgtcgcattcaccggcgtgtaatggctggcatgcaaggtggcgacctgcttgaggatgtcgccattgcccgcaccggccaggttgaagtagctgtggttggtgaggttgagcaccgtgggtttgtcggtggtggcgctgtagtcgatgtgcagttcgttgttgtcattgaggcggtaggtgacttcggtcttcaggttgccggggaagcccatttcaccgtccttggacaggtaggtgagggtcacgccaaccgagtccttggccttgacttgggtggctttccacacccgcttgtcgaagccctgggcgccgccgtgcagcgagttggggccgtcgttgagtggcacctggtagcgcttgccgtcgagttcgaaggcgccgccggccaggcggttgccgaaacgaccgatggttgcgccgaagaacgccgtaccgctctgatagccttgcacgtcgtcaaagcccagtaccacgtcgtcgagcttgccatttttgtccggcaccttcagcgactgcaacacgccgccgtaggtgatcaccgtggcttgcatgccatggctgttacgcaggatgtactgctcgacggcagtgccgtcattggttttaccgaacgctttgtgttcgctggtaaggcctgccgcctgggcgccgccgctggcgaccagcatggacagggcaaggcccgaaagcaggtaacgagggtgcttcatggtcgaacttccttttgttgttttgagtggaatagttctactaatgtgcgatattttgtcgatatgacagcgaatttatagccttaaaccgggtttttgcaaaataaaataagactaattaagcgaggcaaccttttatgacgacgcaacatgcggtttaccccgaccttgaaggcaagaccgtcctgatctccgggggtgcctcgggcatcggcgaattcatggtgcgcgccttcgcggcccaaggcgccaaggtcggctttgtcgaccgcgcacaaagccagggcgaacgcctggcagcgctgttgagttcacgcgggcacagcgtggaattcgtcaattgcgacatcaccgacgagattgcctataaagccgccatcactcgtttcgaacactccctggggccgatcaccgtactggtgaacaacgccgccaacgacgtgcggcataccctggaggaggtcgactcggagatgttcgaccggctgatctccgtcaacctcaagcacgccttctttgccgccaaggcggtggtgccgatgatgaagggcgcgggcggcggggcgatcatcaacctggggtcggtcggctggatgatggcttcggccggctacccggtatacgccgccagcaaggccgccgcccacggcatgacccgcgccctggcccgagaattggggccgagccgcatccgcgtgaacacgctggtgccgggttgggtgatgacggaaaaacaactggcgatgtgggtcgacgatgccgccaaggaactgatcagccgcagccaatgtttgccggggagtgtgttgccggaacacatcgccaacatggcgttgtttcttgcctcggatgcctcggcgatgtgttcggcgcagaactttattgtggatggtgggtgggtctgagtcgggctcaatccttcagtcaacactgaactgatgtgggagggggcttgcccccgatggcagtgtttcagtaacaggtgtgcagactgaggccacgctatcggcggcaattcgaatcgtcacgccgccccccacattagaactggcttgcctactcgattggataacgcttgaaagccgagtgctgttccaggcgctcggcgtggcgtttcaggttggggaacgcatcggcctcgaccaccgacgccacggtgaactggctgaacgaccaggcgactgccgctgtcagggaagcctgggtcaactcctgactgtcaggcagttgtttttccagcagcgagtaggccgccagcaactggccgctgacgcgatccagccagggcgcatgcagcttttcggccgggcgcaggttgtgttcgtaaacgatctgcacgcttttctcgcaggccgccagggccaggccaaggatatgcaggtcatgggcacgggcgtcgggggaagggggcagcagctttttgtcggccggggccagggtttccagatagtcgaggatcaggctggaatccatcagcaccgtgccgtcatccagcaccagggtcggggccttgaccaccgggttgatctgggcgaactcgctgaaggtgctgaacaccgacagtggttcatgcacaaaatccacgccgtacaggtccagggaaatggccacgcggcgtacgtagggcgagtccagcatgccgatcagtttcatgaagcctccgttgctcacaaggtgatggctccagagagtaagggcacaggatcggcatgcgcaatgactgaatgttgcctgcaaaggtcaggctgcggtcattcaggcaggacgcctgatgttctgccggctggcccccggtggctggccggtaatgcgcttgaatgcacgactgaacgccgcctgggaggtgtagcccaggcgcagcgccacttcttcgatgggtaaacgctccagggtcagccattggctggccaggcgcatgcgcagttccgtcatgtagcgcagtggcgggatacccaaggtcgcctggaagcgttcggcgaataccgagcgggaggtatgacactgcgcggccagttcggccacgctccaatcgcgcccgggttgctggtgcagcacgagcagggcgcccgccaaccgtgggtcgcgcaacgccgccaccagccccgaggcattgccgcaggcacactccacccaaccccgcacaatcatggcggccaccacatcggccaggcgcgtgaggatgccggggtagccgacgcgagccgtggcgacttcgcgttccatcaccgccaggatcggcatcaggccggggtaacgctggccctgggcatcgatcagcatcaaggccggcatcaggctgcccagcccctggagactgccgagttcgaactccatgcaggcactgaacagcaaggtacgtggcggcgagtccggtgatgcatccacagcgcagacgctatcgcccagcgacgtcgcgtcaaagcctccgatgtcctgcaccggcctgtccgcactggacagcagcgcatgggcaccgccgtgggagatgaacacggcattgcccgcggacaattcgaacaggctgtcgtcgtcggtgcgcagggtggctgtccctgcggcaaggaaatggaagtaggcatgccccggtctggcgtcaaagcccatgccgaagctcggcccggcctggatacgtcgatactgcacgccgcgcaggcgcatgccgcgcagcagttcgtcgataaggtcggaggacagggtgaacggtgccgctgcagtcatgttcggggtttcggtcaaaaactaaagtgtttgaatcatagatcatccgggttggcaaacctagactggccgtcgtgctaatgaccgaggatgtcgtgtgatgaatgattgtgtagcccaagccgctcaccctgcccaggtggcgcccgatgcgcccgcctggatggcggtgttttccctggccatgggggtgttcggcttgttgacggccgaatacctgccggccagcctgctgacgccaatggcgatggaccttggcgtgtcggaggcgctggccgggcaggccgtgactgtgacggcggtggtggcgttgttcgccgggttgctggtgccgggcctgacgcgtggaatcgaccggcgcgtggtgctgctgggtttttccctgctgatgattgcttccaacctgttggtggcgttttcttccagcctggcggtgctgctgttgatgcgcatcctgctgggggttgccctgggcggcttctggagcatggcggcggctgtcgcgatgcgcctggtgccggcggcgctgctgccccgggcgctgtcgatcatcttcagtgggattgccgtgggcacggtggttgccgtgccgctgggcagctacctcggcggcgtgtacggctggcgcagtgcatttgtggcagcggcagcggtcggcacggtgacgctggtgttccagctgttcacgctgccgcgcctggctcccacgggcagtgcacgcttgcgcacggtgctggatgtgctgctgcgtccaggcatcgccatcggcatgttgggctgcgtgctggtgcacaccgggcactttgcgttgttcacctacatccggcccttcctggaaagcaccacgggcgtgggcaccgaagggctggccttgatgctgctgggcttcggcgccgccaatttcgtcggcacgctgttggccggttggatgctggtgcgttatccgcgcggcacgctggtgctgatgccggtgttggtaggcgtcgcggcgctggccctggtgttgctgccggcctcgctgccaggccaggcgttgctgctggcgctgtggggcatggcctttggcggggtgcccgtggcgtggtcgaactgggtggcccgcgctgtaccggatcaagctgaaagtgccggcggcatggtggtggcgtccgtgcaatcggccattgcggcgggcgcggccggagggggcgcgatgttcagtctcagtggcatcagcggcgtgtttctcggcgccggtgtgttgatgctgttggctgccctgttgattgcactgcgggtaacagtgccgggcaatgacgccgtgggtgcaccgctgcatctttgacgtcagcctggagattggccgtattcacggtgtgacgagccatcgacctttggtttagtctggagcgcttcgttgaacgcaagcacatttggagcagtaagcatgaccgattacgtacccccgaaagtgtggacctgggacaccgagaatggcggcactttcgccagcatcaaccgccctgtggccggcgcgacccatgaaaaggaattgccggtgggcaagcatccactgcagttgtactccctggccacgcccaacgggcagaaggtcacgatcctgctggaagagctgttggccctggggcacagcggcgcggagtacgatgcctggctgatcaagatcggtgacggcgaccagttcggcagcggcttcgtgggggtgaaccccaactccaagatcccggcactgctggaccgcagcgacgccacgccgattcgggtgttcgagtccggagcgatcctgcagtacctggccgagaagtttggcgcgttcttccccaccgagccggcggcccgcgccgaatgcctgtcgtggttgttctggcagatgggcagcgcgccctacctaggcggtggtttcggccacttctatgcgtatgcgccgagcaagatggaatatgcgatcgaccgctttgccatggagaccaagcgtcagctcgatgtgctcgaccagcgcctggcggtgagccaatacatcgcgggtgatgaatacaccatcgccgatatcgcgatctggccctggtatggcgggttggtcaaaggccgtttgtacggcgcggcggagttcctctcggtgcatgaatacaagcacgtgctgcgctgggccgatgcgattgaagcacggccggcggtgcagcgtggacggcgggtgaatcgggtgtctggcgaggagcagttacccgaacgccatgacgcaagcgacctggactgagtgtgggagggggcttgctcccgatagcggtggatcaggcacggatgtatcgactgacccaccctcatcgggagcaagccccctcccacatttatttgtagcgctgctcgaacaccgccacctgctccggcttgatcagttcaaacggcacccacacctccggctcaatcgcctcgcccttgatcattcgcaccgccgcctgcaaggcctgtgtggcctgggccttcgggtcctggaacaccgaggccgtcagcaagccgcgcttgatcgccgccagcccgtcgggcaagccatcaatgcccacaatcgccacatcgcccttggctttgcccgcttgctgtaaagccatggccgcaccaatcgccatttcatcgttgttggccacgatggcatcgaactgcgtgcccgccagcagccagttgctggtcaggtccatgcccttgctgcgctgccattcggcgctttgctgctcgaccaccttgatcccgggaaagtccttgagcacctgtttggcgccctcggtgcggtcatgggtggcgttctgtgcgaggtcgcccatgatgatcgccacgttgcccttgccgccgagtttttccgccaggtagcgcatctgcaactgcccggcctcgatgtcgttggaggccacggtgaccacgcctttgggcagggtgcgttcgtccgggtggcggttgacgtacaccagtggcgtcttggcggtgacggcggcgcgggtcatgttggcggtggcggcggtgtccaccggcagcacgatcaccgcgtcgaccttctggttgagaaagccttcgacctgattgagctggcgcaccacgtcgccctgggcgtcttcgaactggatctgcacatcctgctgcttggcggcggcttcgaggccggtgcgcacgtaggtcatgaagttatcgtcgacccgggcgatgctcacgccaatgcgataggcggcgaaggtccattggctgaacagcagcaacagcgtggcagcaagcaatgaatagcggttcataagggggttccttttattgttatagggtgaacgcctggcggaaacgtgccagggccaactcactgtcaccgctggcccagccttccaggccgaccacgccgctgtagcccatggcatgcaaggcccgggcgatggccgggtagtggatttcgccggtgccgggctcctggcgccccggcacgtcggccacctggatttcaccgatgtgcgggccggcgcgctggatcagctcgatcaggtttccttcgccgatctgcgcgtggtacaggtccaggttcatcttcaaatgcgggctgcccacggcctcgatcaacgccagagtgtcgtcggcgcgggcgaatggcgtgccggggtgatcgacctcggtgttgaggttttccagcaggaacacacggccggcgtcttcccccaggcgggcgattttttccagggtcttgcaggcgctcagccacatgcggccggtggtctggctcacgggttggacgggcaggccgccgtcacccaggccggtaccgtgcaggttgaggctagggcaattcaactgctcggcgacccctaaggattcgcgggcgctgtcgagcaactggcggatgccgtcggggtcggtgagggtgccgctgatgtagccggtcatggacgtaaagtcggcaccggtggcggcgagggcggcgatgtccttgtgggtccagtcccagatttcaacgctgaagcccagcgcatgaatacgctgtacgcgctcgatgaagggctggtcgagaaacaccatctccgcgctgatcgcgagcttgaacgggctcatagggtcaccgccttgcccgtttcgaacgattcgatacaggcgcgggcaatcgccagcgccgcgcgtgcgtcttcaccgctggccaggggcttggcgccgctgcgcaggcaatcgacaaagtggttgagctcggcgatgtaggcgtcgcgcaacaggtcggtgtccatgcgctgggtgtcggcctggatgccttgggcgaggtagcgcaccaagtcggactcgttaaggctgcccatgctcagcatgccggcgctgccgaacacttcgccgcgcacgtcgtagccatacacggcctggaaattggcttcggcagtggcgatggcgccgttgtcgaagcggatcgcaaccacagcggtgtcgaggaagcctttgtttttgtaatcgggcgcgatcagtgcgtcagccatcacgtagacctgcaccgcctcggcgccggggttgaggtagcgcagcgtgtcgaaatcgtggatcagggtctcgaggaagatcacccattgcggcgaagcggccgggttgttcagcgccgggtcgcgggtcagcgagcgcagcagctgcggggtgccgatgcggccggcggcgacgtcgaggtgcgcggtgcgaaagctcttggcgaaacgccggttgaaaccgacctgcagcggcacccgcgcatcggccgcggccgcgatggcacggtcggcctcatccagggtgatggccatgggtttttcgcagaagatccctttgcccgcgcgggccgcgctgatcaccagctcggcgtggctgcgggcgggggcggcgatgagtacgccgtcgatgtccgggtcgtcgagcaattgttgagggtcggtgtaaaccttgctcacgcccagttcagcggcgaggcgggcggcctggcctggcgtcgggtcggcaatcgccgccaggctggcgccggggatatgccgagcggcggtcaggccgtggaagctgcccatgcgaccggcaccgatcaaacccaggcagatgtgctgtgtactcatgaaataaccccttgttgttattggccccaggacggtcctggtgggcgaaggggtaggagcaaggcttgtgccaattcataacacattgataaatagcgatttattattattcataagcaaatagtgttcatttaatgaacatgtctatactgacatgtcaaaaacatggacatggataccgccccaatgagcatggcgttcagcgtgcaagacctcgactacctcgcagcccttgggcctgctgcgctgaatgatggcccagtggccgcgctggagcaggcctggcgtgactgcctggccggtcaggtcgagcgcccggcgcacgtgcgccaagtgatctgggattcgtggcggcgcagcgtcgaggccggtatcgacccggcagacaaggcgtaccgcttcgtggccgccgaaaccctggccgccacccagaccacccaccgcgtgctgatcgccgccgccgcgcaagtcatgcgaggtttgctggcctacaacccgcgaggccatatcaaccttaccgatgccgacggcaccaccctgtatttctgcgggctggacatcacccccgtgggcagtcgtctgctggaatcggtacaaggcaccaactgcaccggcctggcgctggccgaagatcgcttggtgtacgtgctggccgaggaaaacttcggtatcggcctgcgccagcgccgcatgcactgcgccgctgcgccgatcaagaatgctcaaggccagaccctggccatgctgaccctcaccgccgagcccggctggtttcacttccataccctcggcacggtgcaggcggccgccgaggcagtgtcgcggcagatggcgttgcaggcgttgctggaagagcagcaaaccgtgctcgaagtcctcaacgaaggcctggtggtgctggacgagcgcggctgcatcaaggcgctcaaccgttatgcccggcagttgttcggcgtagggctggagttgatcgggcggccgttccagcaactgggccgtagcgagttgagcgatgccctgggtgaacccgtgcgcgacctcgattgcaccttccacctgaacaatcgcagccaactcgcctgcctggtttcggtgtgcccgctggagcagggcggggtgatcgtgtcgctgcgcgaaaaccgccgcattcgcgaaatcacccggcgtcttatcggcacccaggccagctatacatttgaaaccatccagggcaactcccgcgccatccacgacgccctgcacctgggacgtatcgccagtcgcagcgattccaccaccctgatcctcggcgaaagcggcaccggcaaagagctgttcgcccaggccatccacaacggcagcgaccgccacaaaggccccttcgtagcggtcaactgcggggcgatcccgcgtgacctggtgcaaagcgagctgttcggccatgtcgaaggcgcgttcaccggcgccacccgtggcggctcggcgggcaagttcgaactggcggacggcggcaccatcttcctcgatgagatcggcgacatgtccttcgatgcccaggtcagcctgttgcgggtgttgcaggagggggaaattacccgcgtcggtgcgaaaaactcacggcaagtggacgtgcgcatcatcgccgccacccaccgcaacctgagtcaggcggttgcggagggcgcgtttcgcgaggacctttactaccggctcaatgtattgaacctgaccgtgccgcccctgcgcatgcgccgtgaagacattccgttgctggcgcggcacttcctggcgcgctgtgcacgttcgttgcgtaaatcggtgcagggcttttcgccggaggcgatggcattgctgtcggcctatggctggccgggcaatgtgcgggagttggaaaacagtattgagcgggcgaccaacctggcgatgggcgagctgattcagcctgccgatctgccgatggaaaccaagcagcacaccccgctgcgcgcctatgagccgcaacccgcccaggacctgagtagccacgaaatgcacgccatcgtcgccgcactccaaaataccggcggcaacatccgcctggccgcccggcaactgaatgtgtcgcggggcgggctgtacaacaagatgagccggtttggcttgagtgccagcgatttccgccgcgcctgagattcaagcagcgctgacccctgtggcgagcgggcttgccccgcgttgggnnnnnnnnnnnnnnnnnnnnnnnnnnnnnnnnnnnnnnnnnnnnnnnnnnnnnnnnnnnnnnnnnnnnnnnnnnnnnncccaacgcggggcaagcccgctcgccacagacagccagcgcctgagtgccgttagaggttctccgacgtcacaatctgcggcggtatatacacccgctgccgcaccggatcgaaccgctcggcactctgcaactccaccatcaactgcaccagcgccgtcgccgtctggcccggttgcgagtccatcaccacatcgatcaagccctggcgcagcgcctggcgcgacagctcggtggactcctgcaggatgcaacacagcgctggccgcttgggcaactgcgccagggcgctgatgatgccgtcgccgccgccgcccaccacgcacaggccgcgcaggtcgctgtggcggctgatcaggtcgagggtggcttcttcggtgatgtcgcagttgtccaggttgatcaaaggctccagcggcttgagccccggcgcgtgctcggccaggtagctgtgcaggccttcgacccgtgcctggtggccgagaaaacgatggccgccgagcaggatgcccacgctgcctttgcgcgcgccgcaggtgcgggcgagcaaccagcccatggtgcggccgaccacatgattgtcctggcccacgtagggttcatcggcctgttcgtggatatccgagagcagggcgaccaccggcacgccggctgcgcggatctgcgccaggcacgcgttgatcagcgggtgcgcgaagctgaccaccgccaggccatcgcactgcacggccaattgttcgatctgcgcgacgatggcgctgggcgagcgatccacgatgtactcgaactggcacgtcaggttggcgttggcatgctgttcggcagccgtgctgattgcctgcgccaggctggcatagaacgcctgggcggtggccagcaacaggatgccgaagcgataggtcggccgacgttcgcgaatgcgctggccgatcagccgcgccgcgaaataccccaccgcttcggccgcctggaacacctgctcggcggtctcgggattgaccggtgcccgtgcattcagcacgcggtcgacggtggccacactcagcccggcctgggcggccacgctggcgatggttgggcgtttgtggttgttcatgactggccccttgagcgtcttgatagaaaactatcaagccccgctgggcctggatgatagcttgatagggaatggattcaaggccttgagggtgaataaccggttctctaaggtgggtttcacacagcaccagaaaccacccgcttgcggagaacaataacaatgcctggacacaccgctcctctcacccgtcgcgactacagcctcaccggccccgaagccgcccgcgccgctgaaaaaggcctggtctcggccaactggtaccagtcgcccatctcgcgtaaacgcatgaaagaactgatgcaacgccgtgacggcccggcactgctcgacacggcgatctgggtgatcgcactgtttgccagcggttttggtggctactggttctggggcacctgggcctgcgtgccgttcttcctcgtctatggcgtgctgtatggcaccgcgtccaacccgcgctggcatgaaaccggccacggcaccgccttcaagacccgctggatgaacgacgtgctgtaccaggtcgccagcttcatgtgcatcttcgaaccccacgtgtggcgctggagccatgcccggcaccataccgacaccatcgtggtcggccgcgacccggagatcgtcgagccgcgtccaccgagcttcctgatgatgggcctgagcctgttcaacctgcccctggcctggaagaccttcagcggcgtggcgcgccacgccatcggcaagatgagtgcccaggaagcggacttcatccccgaatccgaatggcccaaggtgttccgtgccgcgcgcatctgggttggaatttatgccgtggtgatcggcaccgccttgtacctgcacagctggctgccgctgatgctggtgggcttgccgagtatttatggcgcctggctcggctatctgttcggcctcacccagcatgttggcctggctgaagacgtactcgaccaccgcagcaattgccgcaccatctacatgaaccgcgtgctgcgctttatctacatggacatgaactaccacctcgaacaccacatgtacccgatggtgccgtaccacgccctcgcgcaattgcacgaagaaatccgcagcgactgcccgccgccctacgccaacctgttcgaggcgtacaaggagatcctgccgaccatctggaagcagcgcagcgaccccacctatttcgtccagcgtccgattcacccgaacacgcatccggccgcccatgcgccggtgcatgcagaaaccgctgccggctgacccccctccaagcacaagagaaaacgccatgaacgatcaatggatcgacgtctgcgccgtgggcgaaatagacgaagaagacgtgctgcgcttcgatcacgggccgcacacttacgcggtgtatcgctcggccgagaatgaatttttcgccaccgccggcctgtgcacccacgagaaaatccacctggccgacggcctggtgatggaccacgtgatcgagtgccccaagcacaacgggcgcttcgattaccgcaccggcaaggccctcggcgcgccggtgtgcgtcaacctcaagacctacccggtgcgggtcgaagcggggcgggtgttgctcgccgtcacggcttgatcatgaacgatcccttgatcatcgtcggcgccggccatgccggtggccgtgcggcgctgaccttgcgtgaagaaggctacaccgggcggctgatcctgattggcgatgagccgcacttgccctacgagcggccgccgctgtccaaaggcgtgttgcagggcacgacggacctggccggctgcagcctgtgcgacagcgtccggctggccgagttgggcattgagcatatcgccgctaacccggtgacgcagttgcagccgcaacagcatcgcctgcaactggccgatggccaatggctgcggtacgccggactgctgctggccaccggggggcgggcgcgccgcttgcctcaggagcaggccaacctgctctacctgcgtacccacgatgaagcgctggccctgcgcgctgcgctgaaggccgggacgcggctggtggtggtcggcggcggattcatcggcctggaagtggcggcgacggcacgtggcctgggctgtgaggtaaccctgcttgaagccgggccgcgattggcgggccgggtgttgccgccggttatctctgaggcgctgctggccttgcatcgccagcacggcgtcgacgttcgcctgaaggtggccttggagtcgatccaggccgacgccgtgctgctggtggacgggcagcgcttaccctgcgacctggtagtggtcggcatcggcatgcaacccaatatcgaattggccacggcggcggggttggacgtggggcagggcattcgcgtggatacgcacctgcgcaccagcgcgccggatatttttgccgccggtgacgtgtgtgagtttcgcctggatggcctgtatcaacgccaggaaacctggcgcaacgccgaggcccaggggaggcatgcggcgctgaacctgctgggccgcgatgtgccgttcgaggcgctccccggattctggtccgaccagtacgactggggcttgcagaccgtcggcgtgatcacgcccttgacggtcagccggccattggcgggcggtggcttgctgctgttttacctggacgccaatcaccgcttgcaaggtgcctgcggatgggcgcccggcaacagcgtggccaaggacatcaaactctgcgagcgcctgatcaacgcgcgactcccactcgatcccgtcagcctggccgaccccgagctgtccctcaaacacctgctgcgaggctgatatgcgccaattcctggtgttccaatccctgtgggccatgcagaccgaacccggcccactcgaggctcaactcgagcgcatcaaggccgccggtttcgacggcattaccgaccatttctacgaacccgccgatgtcgcccgcctgcacgccgctgccacagcgcagggcttgcagatcgaaggccagttgttcccgcaatcggtggatgacctggccgccgcactggatgtgatcagcgcctacggctgccaccacctcaccctgcaagccgatgtgcgcccacgcacccaggccgaggcggcccgactggtggaaggctggcagcgcttggccgagcaggtggattttccggtgctgctggaaacccaccgttatcgcctcaccaacgacctgctgttcacccttgacctgctggcacagatgccggatttgaagctgctggccgacctgtcccactacgtggtcgggcgtgaactgccggagcctggcgccgccgaggacgatgcgcagatacgccgcatcctgcgcaacagctggggtttccatggtcgcgtggccagtagcgagcaggtgcaggtgtcgttggacttcccccagcaccaagcctgggtgcagcggtttaccgagtggtggcgctacgggatcgaagactggctggcccgcccgcagacgccgcagagcctgtcctttacctgcgaactcggcccgccgccctatgcgatcaccggtgcggacggccgcgagatcagcgatcgctgggccgaagcgctgaagatgcaggggctgatgcgtgaggtgtggcgcagttgtcagaaatgatctgctaatctgcgcgggttcaatctcgccctttagcctggactttcaccatgaccccatcctccgttcagccgcccctggaaccgcagtccgtgtgccacccgatcaccagcagcgcgattttcatggtcgccactgtcacccccggcagcgaggacagggtacgcgcctggtgcgccgatatcgccgggctggtgcgctcggtgggcaagcgcgtgccggcgggcaacctgacctgcgtctgcgggtttggctcgaatgcctgggaccgcctgttcggcgcgccacgcccggcggcgttgcacccgttccgtgagttcggcgtggcagggcgcatggccgtgtcgacaccgggggatatcctcctgcatatccgcgccgaacagatggacctgtgcttcgaactggccacccacatcatggcggccctgggcgacagcgtgaaggtggtggatgaggtccagggtttccgctatttcgacatgcgcagcatcatcggctttgtcgacggcaccgagaacccggtagggcgcaaggccgagggtttcaccatcgtcggcgatgaagacaacgagtttcgcggcggcagctacgtgctggtgcagaagtacctgcacaacatgaccgcctggaacggtttgacggtggaggcccaggagaaagtgatcgggcgcaccaaattgtcggatatcgagctggatgaagaagccaagccaagcaactcccacagcgcattgaccgtcatcaccgacgagaacggcgaagaagtgaagatcctgcgcgacaacatgccctttggccgacccggagccggggagtttggcacctacttcatcggttatgcgcgttcgccgcagcccctggaattgatgctggagaacatgttcgtcggccgcccggtcggcaattatgaccgtctgctggatttcagcacggcagtcaccggcggcctgtttttcgtgccctcggctgacctgctggaagaattggccgaccgaaccggcagtctgtaaggcaacacagtacaaatgtgggagggggcttgcccccgatagctgtgtgtcagtcaacttatatgcagctgacactgcgcaatcgggggcaagccccctcccacattggattattggtggtttgagatttgtgttgggtcagctcaacagcccagtgctgaccgccacaatcaggaacacccccagcagcgcacggtagatcacgaacggccaggtggagaaccgctccaggaacttcatcaggccccagatcgcaaagaacgccgagacgctcgccaccaccagaccgaacagcaagtgcggccaggcatgcgccggcatgtcggcgtgcagcaacacccacaactccttcagcccggcgagggcgatggccggcaagcccagcaggaaggagaagcgcgccgcttcctcacgcttgaaattgaggaacagggcagcggtcaacgtggagccggagcgcgatacccccggaatcaacgcaccaatctgcgcaatcccgacgatcaacgcatcgcgcaggcgcatttcgctcacttcacgggtgtggcgtgcgcgaacctccgccaccgccagcagcaccgccatgactacgcaggaaatgccgatcaccatcagcccgcgcagcggcgagttgcatgcgttcaaggtcgaggacagcgccaggccggcaatcccgatggggatggtcgccagcacgatcgccaccgcgagtttgaaccagcggtcgttgtagtcaccccgacgtaccgcgccgatgctgccggtggtgacctggcgcacatcgcgccagaagtaactgaccaccgccgccagcgccgccagttgcatggccgcggaaaacgccgagccggggtcttgccagccgagcagggcgggcaccacgcgcatgtgggcggtggacgacaccggcagcagttcggtaatgccctggatcacgcccaggatgaagatctgcaggtaatccagggaggcaaaacccacatccaggccggcggtacacatgttggtcaaaataggtgtccttgaagagcagaggcaaatttcacgaagtttattcgaaatgtttcaaggtttcggcagaggcaacacctatttgcaatcggttcagcaagtagaaaggttggcctctgcccgtgttttgtgaacaatggcgccctgcgttttttcaccgagagccccatgcctgaaaccaccgtcgaattgatccagaccggccccgaagaagccgagctgatccgtaatctctaccagtactacgcctatgaatcgtccgattgggaacaggaagatgtggaggccgatggccgtttctatatccatgacgaacacctggcccgctactggcaagacccgcaatggagcgccaacctgctgctggtggatggctacatcgccggcttcctgctgatcgaaggcagcgaactgccaggcatcgacgccctggaactggccgacctgttcatcctcaagcgctaccgccgcaaaggcattggtcgcgccattgccagccaggtgctatgcagcggccaggccaattggctggtgcggttctatgaccaggacgaagtgtcccaggcgttctggcgcaccgtgctggataacctgccgcgcccggtgcagacgatagagctggaggatgacccgcagttggtcagttacctgatcacgcgggcggcgttgcattaaaagcctgctgcatcacctgcggcggctggccgaacgcccttaaaaacgcctggcgcatacgctcgcgatcaccaaagccggtttcgcgggccaccacctcgaccgggtgacggctggtctccatcagcgcccgggcggcttccacacgcagggcttcgatggctttggccggtgtctgcccggtttcctcgcggaatacccggctgaactggcgtgggctcagccgggccacatcggcgagggcttctaccgagaggtcgtgggtcaggttctcacgggcgtaggccagggccagttgcacgcggtctgacttggggtccagctccaacagcgccgacagttgcgattgctcactgccgcgacgctgggcaatcaccagtttgcgcgcaatgcgccgggcgaggtcgctgcccaggtcgttctccaccatggccaacgccaggtccacgccggcgctcatgccggcaccggtccacacctggccgtcgacgataaacagcttgtcttcttccaggcgaatgtccgggtagcgcttgcgaaaggccggtgcgtgaatccagtgggtggtggtgcgcttgccttcgagcagaccggcttcggccagcacgaagatgcccatgcacagcgaggccacgcgccgcgactgggcggaggcggccttgaccaattccagcaggttggcttccggcaggcggaattccaggtagccgctgacgatcagcgtgtcgtagccctgcggccggatcggcgtggtgttcacggaaaagccctgggacgtcatcaccgcgccgccactctccgacaccaggtggaactcataggctggctcgccgcgcagcaggttcgcgcactcgaacaccgaacccaggctgaggctcagggattggaagttcgggtaaaccatcagcgcaacgctgtgcatcgtcattctccaaggggcgcgggagaggggattgtcggcgcgtgccgggtaaacggcaactgccttcgcggcatgtccggaatccttgcggatctgacattgtgcgcgatagccccgactcctaacattccctcaacgaactagacgactggtctaatcggacgggatcaagcatgagcagcgaaaccaaaagtgcaagacagaccattctggacaccgcgcaacgtattgtcggtcgcaaaggattttctgcggtgggcctgaacgaaatactgcaagccgccgaagtccccaaaggttcgttttatcactacttcaactctaaagatgcgtttggcgttgtattgcttgaccactacttcgaccactacgtgcagggcatgcagcagttgtttgaacagccgggcatgagccagcacgccaagctgatgcgttattggcacagttggatcaacaaccagaccggctgcaccgacgcgggcaaatgccttgccgtcaaactcggtgccgaggtgtcagacctttcagagccgatgcgcctggccctgcaacgcggcaccgcacgcaccatcgggctgctcgccgaggccttgcagcagggtgtcgaagacggctcggtaacgcttacgcaacaccccgaaagcctggcccagcgcctgtatgcgttgtggctggggaccagcgtcatgagcaagatcacccgtacagcggcgccgttcgaccaggcgctggggttgacccgacagttgttggggcatccgcacgacactgacactcacacctatcgaggcactggaaaatgaaagtattaatggtactgacctctcacgaccagctcggcgataccgggcgcaagaccggcttctggctcgaagaatttgccgcaccctattacgcgttcaaggacgccggcgccgacgtggtgctggtttccccggccggtggccagccgccgctggacccggtcagcgacctgccggacttccagaccgaacagacccaccgcttcgctgccgacccagccgcgcaacaggccctggcgaccacgctgaagctggattcggtcaacgccgatgacttcgacacggtgttctacccaggcggccacggcccgctgtgggacctggcagagtcgccggtatcgatcgcgttgatcgagtccttcgagcgtgccggcaagccgatcggctttgtctgccatgcaccgggtgccttgcgtcacgtcaaggcagtcaacggtgagccgctggtcaagggccgtcgagtcaccggtttctccaactcggaagaggccgccgtggaactgaccgatgtggtgccgttcctggtggaagacgagttcaagaagttgggtggcctgtatgagaaaggcgctgactggcagtcctttgtcattaccgatggcttgctcgtcaccgggcaaaaccccggcagttccagcgatgtcgccaaggccctgctgaaactcaccgcttaactcaataaaccgctgcaagcattggcgacttgtaaaagtcgccaatgctttagcgcgcccgctatttggaaattattcaatgaatcactctattttaagtaccccggtaaacctggggcaccacacgctgaacaaccgtattgtgctgccaccgttgacgcgccagcgcagcgcccagccgggcgatatcgccactgacttgatggccgagtattaccgccagcgcgccagtgccggcttcatggtcagtgagggtacgcagattgaaccgcgtggccagggttacgcgtggacgccgggtatttatacgccggcgcagatcgacggctggcgcaaggtcaccgaggcggtgcatgccgaaggcggggtgatctttgcccagttgtggcatgtcggtcgggtgtcccataacgccttgcaaccggacggcgccgcaccagtggcaccgtctgcgctccaggcattgcaggccaaggccttcatcgaaaccgcgccgggcgagggtgagttgaagcaaccgccggtgccgcgagcgttgaccaccctggagatcgaggagctggtcgggcactacgcccaggcggcgcgcaatgcattggatgccgggttcgacggggtggagatccactcggcgaatggttacctggtcaaccagttcatctccgcccattccaaccagcgtgaggatgaatacggtggctcgctgcacaaccgcctgcgcttcctgcgcgagatcgtcgaagcggtgaccgccgtggtcgggccagagcgcctgggtgtgcgtttctcgccgctgttcagcggcaccgaccaggaccgggtgtacatcggcctggtggaagatgacccgcaccacacctatatcgaagcgatcaaggtgctggaggcgtcgggcatagcctatgtgtcgattgccgaagccgattgggataacgccccggtattgcccgaatcgttccgccgagcggtacgcgacaccttcagcgggcggatcatctatgccggtcgctacaccgctgagcgcggtgctgatctggttgaagcagggctggcggatttgatcgcgttcggccggccgtttatcgccaatccggacttgccgcagcggattttcaacgactggccgttgaacccgctgcgggcggaagggatgtatgggggcggcgaagcgggttacgtcgactatccggtgttcgccgggtaatcaaaccacccgcaacacaatcttgccaatgtgatcgccaccttccatccgcgcatgcgcctgatcggcctgggtgtaatcgaacacctggtcaatcatcggcaggcagcgcccggctgacagcaccggccatacatgctcgcgcagttgctcggcgatggcggctttctcgtccttggtgcgggcacgcagcaacgagccggtgacgatggcgcgtttgccgaggatggtcagcaggtccacgtcattggccttggcgccgccgaggaagcccagcatcaccaggcgtccgtccatggccagcgccttgaggttattgttgaggtaggaggcgcccatgatgtcgaggatcacatcgacgccttgatctccgatcacctcggcaaaatcctgctcgcgataattgatcgcttcagcgcccaaggcacggatggccgcacatttctcttcgctgccggcggtggcgaatgcctggataccgaactcgcggcacagcatcagcgcggtggtgccgatcccgctggtgccgccatggatcagcacgcgctggcccttgtgcgcgccgccgatgccgaacaggttggcccacacggtaaaaaaggtttccgggatagcggcggcctgaatccactccatgccttcgggaaccggcaacgcctggctggcgggcaccgcgcagtattgggcgtagccgccgccgttggtcagggcgcataccctgtcgccgattgcgtattcgctgacccctgcgcccagcgcgaccacctcgccggccacttccaggccggggatcgggctgaagccgggtttcatcgggtacttgccggcacgttgcaaggcgtcggggcggttgaccccggcggcgtgcacgcggatcaggatttcgccgggggccggggagggcaccggttcctggcgcggcttgagcacctcggggccgccgggcgtggtgatttcaatcagggtcatgtcggtaggcagggtcattgggcgaatcctgagtattttcgatggctgtgagcataaccgagattggtgatgcaataatgctgcgaatcagcatgataagagtgcatatatgcagcagtggaggaggcaatgaactgggacgacgcacgggtattcctggcagtgtgccgcgaaaacacattgcgcggcgccgcacgggtgctgggcgtcgaccaggccacggtggggcgccgggtcaacgccttggaaaagtccttgaacgccaccttgttcctgcgcacctccgagggctacgcgctcactgcggtcggcgaagcagcgttgctttcggtggagaaaatggagcgctcggccctcgacctggagcgccagatccagggcctggatgaccgcctgaccggcaccgtgcgggtcagtactaccgattccctggccatcgatttcctgatcccggccatcgcgcgcctgcacgaccaacaccccgatgtgcgcgtgcaactggacgcgtccacccagatcctcagcctggccaagcgcgaggccgatatcgccgtgcgcaaccagcgcccggataaccccgacctgatcgcccggcgcattgcgcgctggccgctcgggttgtttgcgtcccagggctacctcgaccgccacggcgcacctgagccgggcagcctgttcgaaggccatgacctggtggtgtaccaacctcacctgcaaagtcagaaggacatgaccctggtctccgaacccttgggccgtggacgcattgtcgcggccttgagttccagcctgctggtgcgccgctccattgctgccggcatcggcatcggtgaaatcccggtgtgcaccggtgagcgcgacgggttggtgcgcctatggccggagcgcacgcggccactgccgtacgacgtgtggctggtgacccacgccgatctgcgccacaccgcacgggtgcgggcggtgatcgaggagattgtcgcggcgtttgccggcacgggggagtgaggtcagcacaggcttgcaagcgcttaggtggttcggtcgacacaatcgatgtttgtggcaatcaaccgagagcacgtatgaacgaatcgacgcgtcaggacctgggattattgtttctgcggatcagcggggcgctgttcctgctgtgggtgcatggcttgcccaagttgctcaactacagcgagcaattgaagctgatcgaagacccgtttcacctgggggcgaacatcacgttgttgctggcgattttcgctgaagtgctgtgcccgctgctgatcattgccggggtgctggtgcgcctggcgtgcctgccgatcctggcggtgctgttgatcgccctgttggtggtacacccggagtggacgctgttcgaagggcagttcggctggctgctgttgatcatcttcaccaccttgctgatcagcgggcctggtcgcctggtcctgagccaacgtttctcctgagcaaaaaaaggccgggcaagcccggccaaaataaggagagggtggttcaggcgtttcagcgttgcaggaacgccagcaggtcttcattcaactgctgcgcatgggtcacggcgaacccatgtggcgcgtccttgtagactttcagttctgcgcccttgatcgaagcggccgccactttaccggtggtttcgaacggtacgatctggtcgccatcgccgtggatcaccagggtcggtacgtcgatcctggtcatgtccgggcggaagtcggtttcggagaacgcggtgacgcaatccaccgttgacttgagggatgccagcatcgccacttgcagggtctgggtcagcacaccgtcagagaccttctggccctggttgaggccgaagaacggtgtgttgaagtcgctgatgaactgcgcacggtccttcaacaggccggccttgatgccatcgaacacttcagtcggcacgccttgtgggtagtccggtttctggccgaacaacggtgtgactgcacccagcagcaccaggccggccacgcgcgcgctgccgtggcgtgcaatgtagcgagccacgtcgccaccgcccatggagaagcccaccagggtcacgtccttgaggtccaggtgttcgatcaactgggcgatatcgtcggcgaaggtgttgtagtcgttgccggtccacggctggtccgagcggccgaacccacggcggtcaaaggcgatggtgcgaaaaccacggctgctcaggtattccatctggtattcccacatgtcggcgtccagcggccagccgtggctgaacagcacgggtttaccgctgccccagtctttgaaatagatctgggtaccgtctttggcgacgaatgtgctcatggaaaactccttgggtcgagggaaaaggctcggcatcactattggtgtaaagcgtacgtcgagcttgtacgggtgtgcttggttggggttaccagctgaatttcagctcgacccccaggtaattgctgtcgtcgcccccggcatcgcgcagggtctgccccacgtcgtagtgcacggcctcgacggcgccggtgaggttggggctgaacacatagtcggtgcgcacttgcgcataggcaccggtccagcgatcgccctggcctgcggtgccggccaccggcaggttgggctgggtgtagaccgcatcgctggtggtttggcgccacagcaggccgatggcggtttgcacgctgagcttgtcgatcggcttgagcgtgatcgacggcttgacgtgaatcaggttgctgtagccggtgtagcccgccagggaaaagtagtagccgttggggaacagcgggttgaaggtgccgacggtgccatccccggttttgcggtcgcccgaggcgatgtccagttgcaggccgatgcgcggcttccaggccacgctgtcgaaggtgtagccggtacggctgccaccggcccaggcgcgaatgtccttgttgccgaccgagccgctttgcagcatcgcttcgatgtcccagtcaaagcccatggccgagccgccaaggcgtgcgtcgaacagatggcgggtctcgtcgccgtcggcgtccaggtaatgggcggcggtgcgctcatacacgccgtagtaggcggacaactcgttcttgccacccaccagtcgctccacgcggaccatgtggaagcgcgcatcgctgttggatttgtcgtcgaagtgacgcccgtcctgatactgcaccggctggctggcgatcccgataaaacgccagttggaggtctcccaatcgacccacagcgcatcgaaggactgccgcacattcgggccgtcccgcgatgagatgaagcgctgcaggtcgaaggcgaaatcctggcgcccggcacgcgccttgagggtgccgctgctgaaggtattcacatactcggcgaaggccaggcgcagatcgacgcggttctggtcggcgccgccgatcgtcgtcttgtcgtacgcccgcacatcttccaattgggtgaacacccgccagtgctcgttcagatgcaggtcggcgtggacctggaagcgttggatcaagtagcgatcacgcttcatatcccgcacgccgaagccactggcatcgttcatctcgaaacgctcgcgcaacgtcgcgcccagggacaggtaggtgtaggggtttgcgctggacagcgggatgtacttcaagctgtccagcggctgcgtgcgcagcgccgggtcccgcagcaccgaccagtcttcctgccagcggttggccttgatggccgggcgtgtcgcttgctcgtcggcgtggacgctgccgacgagcagcggccacagcacggccaggccccagcctgtgcgacgcgtcattttgcggcgttgagttgatggatctccgcgacgtagccgcccggaaactccaccaacgcactgcgacggcctttgctgtcgaacgcaggcaccaagactttggcgccggagccggtggccttgcccagggtggccgtcaggtcagccacttgatagccggtggtctcgtggccgaacgggtagggcagttggccgttggtgaccagcaccgccatgcgcccgaacggcgattcgatgtcgacgcgacggtagttaccgttggcttggccgatatctgcacctggggcgtgtttgtcatccgccaggactttgccgtgggcgaagccgataaacgctttgataaaggtgtcggcacggtcggcactgaggtacacgcggttttccggcacggtctggaacgcggcgtaatccggggtcttggtgtgccagtaaagctgcatgttcacgccgcctggccactgcaccacggcgtcacgcccgatcgggtcgggaaagttgctgacgatcaccgccgcgccgttctcccgggcggccttgagggcgaggtccatgtccttgaccagatagccgttgcgctcctggccgaacgggtgcgggatcggcgtggtgaaaccgaacagcgataccgtgccggcgggggtctgtagcagttgcgaagtggtgctgctgggcaccggcagcacgttcaccaccacctggggcgtgcttttaccgccgaaggtggccaggaaactctgggcaaagcggtcgacatcggccggagcgacgtagacgtggctggtgtcgtattgcggggccacggcgaccgcaggcgttgcggcgaaggcgctgttcatcattgccccggccagcaaggtgactgccagcgataccgtcctgacttttctacacatacccactctcccgcgttttgagaaagtctcgatcttaggggcggggcagaccggcggattgtacggacgtgctcggttgaacgattcagcgtctatgctggtcatcgtagaacggtgtcatccaggaggctcaggacatgctcgacttctgcgccaggcacgggattgtctcggacatcgagatgatcgatatccagggcatcaacgaggcgtatgaacggaggctcaagggcgatgtgaagtatcggttcgtgatcgatatggacagcttgaaaaaggaaagcccggcggcttgaaatgcattctccaaaccgctgtagaacacctgtgggagggggcttgcccccgatagcagtcgggcagtcaccgcatcattgactgacccgccgctatcgggggcgagccccctcccacattggtttgcggtgtgtctagaccgagaggtgttcgtacagaattgtcgctcccaccagcatcagcaccacaccaccgaccatctccgcacgcttgcccaccaccgttcccagtactcggccaagcatcatcccgatcgtcaccatggtcatggtcgccaggccgatcgccgccgccgccaccaggatgtttacgtctacgaacgccaggcccacgcccaccgccagcgcatcgatgctggtggcgaaggctgtgacggcgaggatcatgaatgagtgctgggtcggcttctcggcctcttcatcatcggctttgagcccgttccagatcatgtgcagccccagcccgaccaacagcgtaaacgcgatccagtggtcccagtcttccacccagcgcgtggcggcgtggccgatggcccagccgatcatcggcgtgatggcttcgatcacaccaaagatcaggccggcgcgcagggcttcggtgagtcgcggtttgtgcaggctggagcctttgccgatggcggccgcaaaggcgtccgtggacatggccagggcgagaagaatcagggaaatggggttcacggtaaggcttccagtcgggctatgggacacaacgacactcccacgcgcccgacttgaggcatggaggtgtcgctggtctcaccaaccgaaaagacggtgttcgcaccacggcaggttgccgaatatgttgatacgaacgcttccaacagggtcagaagccggttactccccaacgaggtggacgatgttaggcgactgggtatgaaaattccgtcaaaaggcctgtggcaagccctctcgccacaggggacttatcgcccgttttgaaaggactggccctcaaggccgctgcggcttcaccgacgtgccgaaggtattgcccatgcgcacgctggtcgccgccggggtggataggcccaccgcgttcggcgggcgtttttcgatggggaggttctgcgcctcgcggttctttttggccgccttggttgcgttcgtgtcgttgcccatctgctggctcaggcagccatagtcgggggccttgtagccgtccacgctgacctcggcgcacttgccggcggcgttttcggcatgggccagcaagggcagggcagcgcacagcaacaggctggcaagggtcggcaaggttttcatcgggcctcctggcgggcccgaaggagtgggccggtaaggcttggaagtctagtgcagcgggcctctcatcaccgtgatgttttttttgctatcaccgtaacatcaggttcataaactggcctcaggatgacggttttctagggcgcgtcggccgtgcagcgatgcagaacagggggtgaacacggagcctggaggcgcttgatgtgcgccctggtcttgctgttgctgctggccggtggtcgcgcggcgcaggcagagtcaccgctgctgccgttgaacctgccggcgcaggacctggaacatgcactgcaagcctacagccgtgccaccgggatggcggtgctggtggaccgtgaattgacgcgcgggcggcgctccatcgcagtgcgcgggcgcttcacggcgcaagaagcactggcgatattgctgacagggagtggcctgatggcccgttatgcacgcagcgatgcgtttaccttgcagaccccgcaagttagcccaccgcccacgacccggggggcggcggcacgcaacgcggcgcggatcaacaacagttatgcgacggcgttgcagcaagccatcgagaccagcctgtgccgctcgccgctgacccggcccggcagttttcgcgcgctggtgcaggtgtgggtcaacccggatgggctgatcgaacacagccggttggtgagttccaccggcgacgaacaacgcgatgaagcactggtgcgcagcctggcagcggcacgggttgaacgcccggcgccgagctcgctgcgccaaccggtgactttacttttgatgcctgacacaacaggaacgcgcatggaatgcacagccgcaaaaggagcctcggagggatgaaaaataccgggcacagtacgatggtcagcctgttcctggcctcttacgaagacttcaaggtgcggttgcgcaagcgcctgggctcggaggacctggccaacgacgtgctgcacgagacctacctgcgggtcgaccgcatggacgtgccgccgaacctgcaacagcccaatgcctacctgtaccgcatggccctgaacatcgccgccgaccgccgccaggccgacgcgcgcctgctcaccggcagcgaggtggaagagctgctgcaaagcgccgacgaagcccaggacccctcgcgggtagtgggcggccagaaagaaatccaatccctggtcaaggcgctctacgaattgcccgcgcgccggcgcaagatcctcatcgccgcgcgcctggaagaggcgccgcacctggaaatctcccagcgtttcggtatttccacgcgcatggtcgaaaaggaaatcaaggccgccctgggccactgtgccaagcgcctggaaagaaaagtgattcagcggttcggtcccggggccggaaaaccgtcttagtgtcgagtccctgataaatccgtgagtacgtgcgcgcttgaatatttttagcctctccaccgcccggcagtccgccgccagccccctgcacgatgaagcccgcgactggctgctcctgctgacctcgggccgcgccaccgtggccgatgccaaggccctcaaagcctggtgcgcgcagagcccggagcatgcccaggctttcgagcaggccaaggtgctgtggcaacaactggcgccggcgcttgatcaagtgtcgcaaccgcgcagctttggccgccgtgccttcctcggcggcgccatcgctgcgtcggcagccgtggtgatggtgcgggtcggtgtaccgggtggctttgccgggctcacagcggactatcgcaccgaagtcggcgagcaacgccaagtgctgttgagtcaaggtatcagcctggaactcaacacccagacccgcatcagccgggtgggtgaaggcatcgaattgctcgaaggcgaagtcgaggtggtcacccacgttgcgcaaccgctgcgggtccaggccggtgaaggctcggtcagcgcggtgcaggcacgcttcaatgtgcgcaataccgaccaccgggtatgcgtcacctgcatcgacggttcactttcggtggacatcgccgggcgcagcgtgcgcctggacagcggccggcaactcacctacggcgcggccggtgtcagcgaggtgacaacggtggacacccaggcggtggtggcctggcgtgaacaggtgctggtgttcaacaacgccacgctggcgacggtggtggacgagatcaaccgttatcgcccgggcatgctgctgctgttgaacagggaactgggccagcgccgggttcaggcacgcttcagtttgcagcagttggcgggcgtggcgttgttgatccgcgatgcgtacggggccaagtgcacggagttgccgggtggggtggtgttgttgagttgaggggctgccgctcgtcgggtaactccaatttttacgatgtaaatggaccgggccagaacgctaatctacgcctgtcgctttcaggtatgcctgtgtgctcatgggttgagccaccggtctttttcctctgacagatctcctttcttgtcctctctgaattgtcattctcgtttgtaggggaaaggactttcagcgtaagaaaaaaccaggaaatgtacgtttcaagtctcacttcctatccggtttcttccttcgactgacattgttcggaagcatctgacagccctccaacggctgtgtgacagacagggcgacgccctcaggaacgccgaattttttgtaacctttcctgttttccttaagcgtttcagcctcggcagcatgggtgctctttccatttgagtacctgtgtgagggtgaaaggatgccggctgtttttcgacctgcgctgctggggatagcgctgttttcagggccgcttcttgccgcgtcccccgcgtcccccggcgaccgcgaattggcccgtgagcgtcagcagcaagtgttggaagagcagcgtcgtcgccttgaagacctgcagaacctgcccggccaaatcgctgtgccaacggctcccgcgctgctggaagacggccagtgcatcaccgtcacgcgtatcaacattgaaggcgcgacattgctgcccgaaggccagcgagaggcgctgctgcaaccctggcaggggcgttgcctgggggtgcctcaactcaacgccgtgctcaaaagcctcaccgatcactacctgcatcgcggctacgtcaccacccgcgcctacctgccacagcaggacctgaaacatggcgaactgaacatcatcgtggtcgaagggcgccttgaagggctcgacagctcatcgctggccagcccgctggagtccgccatgacctttcccggcaccgtaggggaggtgctcgacctgcgcgagctggagcagtgggtggatcaactgtcgcgcttgccctcgcgccagccgcagcttgaggtgttgccggggcaggcagtggggggcagccgcgtgacgctcaaaggtgagcgccgcgaaccctggcgtgtctcggccaaccgcaacaaccatggcgatgccagcaccggtcgccagcaggccggtatcggcctggattgggacagccccctgggcctggcggatcaattgaacctgcgggccagccgcgacaccgtcagcgaccgctggcgccattcccacagccagaacctgttctacagcctgccgtatggttggtggacgttcaatgtcagccacagccaaagcttctaccgcacgcgcaacgacctttccgggtttgccttcgcactgtcaggcgagacgtccagccagcagttgcgcgccgagcgcgtgctgcaccgcgataacctgggcaagacggcgttcagctttggcctgagccacctgcggacccgcaactacctggaagacgcgttgctgcgcacctccagccatcgcaccacggagcgtcaactgggcttcaaccatggccgccgcatcggcaacgcctttctcaacctcgatgccggctggcaacagggcatcggcgccctggacgcccagcgcgatctctctacacagcgcggcgcgccgacctcgcgctatcagaaatacaccctgaccctcagctatttgcaggcctttcgctggctgggccagcactggagtgtcgacagccttgccaccggccaacacgccgaagacgaactctatgggccacaacgcctgagcgtcggcggcctcggtgcggtgcgcgggttccagcaacagaacctttcgggcaatagcggcggctactggcgcagccaggtgcgctggcgccaaccggtggcctgggaggcgctgcggccctgggtgcacgaagtgggcgtgggctttggctacgacgtcggagtgatccgccgtggcccgcacaaccctgaagtcgccgggcgccttaccggccatgcctgggaactcagcgcacggggtactcaccttgcggcttcgctggtgcttgcccgttccctggaacgcccggccatcgttgagcgtcgcgaacacccggtctacgcccgaatcgacctgtttttctgaataacaacaaggaacctagcctatggacgtgcgccgcccgttttaccagtgtctggccctgagcctcacaggcatcatcttcctcaacccgattgtcgcggccgccgccgagctgagcgtggacccggccagccccggcaccagcctcggccatgcgcccaacggcgtgccggtagtgaatatcgccgggcccaatggcagcgggctgtcccataacctgttcaccgactacaacgtcggcagcaacgggctgatcctcaataacgccacccaggccacgcaaaacaccgagctcggcggtgtgatcctcggcaacccaggcctgcaagggcggcctgccagcgtgatcctcaacgaagtcaccggtggcaaccgcagccacttggggggctacaccgaagtggccgggcatgccgcgcgggtgatcgtcgccaatcctcacggcatcacctgcaatggctgcgggtttatcaatacgccgcgcgcgacgctgaccaccggcaagcccgtgatcgaaggtgggcggctggatcactttcgcgtagacggcggcgatattgcgctggagggcgccgggctcaatgcccgcaatgtcagccagttcgatctgatcacccgcacggccaagctcaacgcgcaactgcatgccgaccagctcaacattatcaccggccgtaacgatgtcagtgccgacactttgcaggcccgtgcccatgcggaagatggccgggacaaaccgcaactggccatcgatgccagcgccctcggcggcatgtacgccgggacgattcgcctggtgggcactgagcagggtgttggcgtaaggctggcgggcgatatggccagcaccgccggcgacatcgtgatcaatgccaatggcggcctgagcctgtcccacaccaccagcgtcggcgccctcaccgccaaggccgagtcgatcgacttacagggcccgacctttgcgatggctgatatcgacctgcagacccagggcgatctggtggtgcggcagagcctggccagcgccgggaatgtcagcctcgaaggccgcacggtgagcaaccagggcaaggtcgtcagcggcatcctggaagaccggcgtatcgcgggcaaacagctgagcatcaaagcccagcgcctggataacccgggtgaactcaatgccagtggccacctggaaatcaccagcggcagcctcgataacagcggccagatcgccgccgacagcgccaggatcgaagcccgccaggacctgagaaacactggccaggtggtcaccgccggccaacttgaaattgccgccagacaggccatcaaccatgccgggacgctgcatgccgaaggcgatttgagcctggtcgccgacagcgtcgacaacagcggcaagatcgtgggggcgggcagtgcgctgagtattgcggccggcacgttcaccaacgcgggcgaactgctcggcgacaaccacctgcacctgcaggtcgatggcgacctgaacaacagcggcctgatcgccgccaaaggcgatgcctatatcagcgcatcaaaccttacccaagaccacggccagattctcagcggccaagacatccaactgcgcgtgcgcgatgtactgcataacctcggcgtgctcagcgcagcgcggcatatgcagattaatgcggctcaactgaataaccccggcacgctcggcagccaaggcaacctcctgctcactgccaacgtcaccaacagcggcctgctgttcagcggcggcgacctgcatgtgcgtggcgagcatttcagcaatcttgaaggtgacctctacagcgtcggtgatttcagtttcgccggcacgcgcttcagcaacctctccggcaacgtggaaaccgaaggcaacctgcacatcaacgcccgcgagtttgaaaacgcccgcacccaccttgtcctcgaacgcgagctggtcggcggtagtatccaatgggtctgcggccagcactgccacggcaacgacagcttcaagcgcggcactatctacatcagcgaaatctggcgcgaaaccgccgcgcccaactccaccagggcggcgcgactggtggccggcaaagacctgcgcatcgacgcgcagaccctggagaaccgctacagcctgctcgccgccaatggcgacgtgcacctttccgccaaccgccttatcaaccagggcgcggcctcccagaccggcatctccagcaccatcatcggcacccccggtcgcatcgacaaagccctgtgggaccagatggaattccacgacctgccggccttcaataacgcacccttcgaccccgtgcgttttgccgaactcaaggcccgctcgaccggagaggggttcagcaaccccggcaccctcaccacctggcgcgaggatggccgcgaagtctatgccgccacgctgcaagccggcggccgcctcaacctgcaggccaccgagtacctgcaaaacggcaccctgcgggaaaacaccctggcgcaactgaccggcgacattggccacaaccccaacgacctcgaactgagccccgatcgcctcagcgatgacctgacccaaccacccgaattccaactccccagcggtaaatacggactgtttatccccagcaagaatccgggcagcccctacctgattgaaaccaatcccctgttcacccacctggccaacttcctcagttcccagtacttgctcgacaagatcggctacagcagcgacgaagcctggcggcgcctgggcgacggctactacgaaagccgcctgatccgtgacgccgtgctggcgaagaccgggcaacgcttcctcgccgggcagcagagcgacgaggaacagttccgctacctgatggacaacggtctcagcgcccgtgacagcctgcaattgagcgtcggcgtaggccttaccgcgcagcaggtggcggccctgacccacgacatcgtgtggatggaaaaacgccaggtgcagggtgaagacgtgctggtgccggtgctgtacctggcgacggtcgacgccaataacctgcgcgggggcagcctggtgcaaggccgggacatcaacctggtcagcggcggcgacatcgtcagtgtcggcaccttgaaagcggaacgggagctgaccgccgtcaccgacggccgcctgctcaatggcggcacgctcagcgccggtgaacgcatcagcctgctggccaccgacagtatccgcaacgcgatggccggcgagatccgtggcagctatatcgaacttaccagcgtcactggcgacatcgtcaacgaccgcaccgcccatgccaagcatcagggcgacggcacccttgtcacccatctcgaccaggcgggccagatcagcgccgcacagcgcctcacgctcaacgccggacgcgacatcaccaaccgaggcgacatcaacagcgctggcgatgccagcctgagcgccgggcgcgacatcaacctcatcgccgtcaccgacacccaacaggtgcgcaccacggaaaacggcggccaccgggtcacccaacacagccgcaccgaacagcttggcgccaacctcaacgccgccggcagcctgagcctgcacgccgggcgcgacatcaccctattggccagccaagccaacgccggcaaagacctgaccgtcgccgccggtggcaacctccacctgttggccgctgccaacgacaccgatcacgcggtcaacagcaaacgcggcggcgccaaggtgcatgagcaaaccacccaggtgcgtcacgtgggcagccagctcaccgccggcggccaactgagcgccagcgcggggcaagacatcgtgctgcacgccagccaggtcaacagcgccaaggacgcgtatctggtggcgggtgggcagttgcaactgctgagtgccaatgacagcgactacagcctgtatgactacaagaaaaaaagcagcttcggcgccctcaagacccaacgcgacgaagtcaccgacgtgcgtgcggtgggcagccagatcaccacaggcggcaacctcaacctgatcagcggcggcgatcagctgtatcaaggggcaaggctggaaagcgcggcggatatcgccatcaccagtggtggggcggtgaccttcgaagcagtgaaggacctgcatcaggagagccacgagaagaccaacaacaccgcattctgggtggcatccaagggcaagggcagcactgacgaaacgctgcgtcagagccagttggttgccgggggcaccatcgcgatccaggccgtcgacggtttgcagatcgacatcaagcaggtcaatcagcagagcgtcagccagtcgattgatgcgatggtcaaggccgacccgcaattggcttggctcaaggacgcagaacagcgcggggatgtggactggcgtcaggtcagggaagtccacgacagcttcaagtacagccactccgggctggggccggcctcgcaactgatcattgccatcgtgatgtcggcggtcatcgggcccatggcgacggccgcagcaggcggcggtgtcggcggcgccatggtgggagcggttgcgaccggcgcctcgaccaatgccagtgtcagcgtggtcaacaaccggggcaatctcggtgccgtgttcaaagacgtgacgtcgtccgatgccctgaagggctatggggtttcggcgatcactgccggcttgacggtgggttacttcgacccgtggaccggagcgcagacccataccaccatcagcaaggtggccacctccggctcgctgggcacctggagcggcgtcggccaattcgcggccaaccaggcgctgcagaacggcacctctgtgttgctgaacaaagccctggggcagggcggcagtgtcagtgacgcgctgaaaaatgccttgttcaacaccttggcggcggccagtttcaacctggtaggggactacacgaaaaacgtcctggcggacggctcgttacccaaggtggcgatccacgccatggtcggtggcttgctggcagaagccactggcggcgacttcaagaccggcgcattggcggcggcggcaagcgaagcactggttggccacctggatacgttggtcaaaggcaacgacaccctgctcaccatgagttcgcagatcgtcggcgtactggcggctgcggcacaaagcgacaccgacgccgccaagctggagaccggcagctgggtggcgaagaacgccacgcaatacaactacctgtcacacaaccaactggaacgggccgccaaacagatagcccgatgcaccgacgcctcctgcattcaggacgccacgcgcaaattccaggaactgagcctccagcaggacattgacgccatcgtcagctgccaggccgaccccagctcctgcgcggcaagctccaaagaagtcgccaacaccatggcgaacctcaacgccatccgcgacatcgccgactacgcctcgcccgacgcccgggaggcggtacagagcctgatcaacggcaattacgaatttcaggaaatgctggcgaccgccacgaccgagcactcggtgggcgcgatggtcgagtcgctcaagtcgaagtgggcactgagcgatgctcaggcgcaggacattgcgcacaatctgaagatcgcactggcggttggggtggggactgcggcgggggtggtggcttataggcgggctgtggcgggtgggggggcgaaaggtgaagctgctgggttactgccaaagcctggaagcacatctctacccgtcaatagcttcggggctgatgccgattttaaggtggactcgaaccagctaggtacaaaactcggtaaacatgttaaagactatggtgggaatgcggccaattcagccgatcggaaaatggtgcttgatcaaattaatgatattgggaataacccagataaagttatccctggaactttttccggacaaggaacaaatggtacgcgtggagatgtattcttcaggatcaaaggtaatgatgttgttgttaccaagcctgacggaacgtttgtgactatcttgaaagatggggtgactcagaatacatctgtaaaaagtgctttgaagggggaagtaaggtaatgagtatttcatatcttatgaatgcttggttagtgagggcgttaggacgtaagctgctttcagtaaatgcattgcttcatgtgttcgagtcttatagaggctcgatccctcaagaggtttctcttcgatttgaagatttggagagtgggaggctatattgcgggagtgatggtgtgtcgctatgtttttctgaagcgcctattgctgaatgcgatttgggtgagtacggaaaattgattgatttttgtgtttctagtggaagttatttttttgatgttgtcgggcttagattgctttcggtctcggctataaagtcctcggtagaatgtaaagtgataggcgttttattgttgtttgaatatgactcgtttctatcaattttgaatttaggggatgagctctttttttgtgatagggtgccagatgaaataattgccagcgaagggttgacgtttgttttgttgggcggaaaagggggggaggaaaacggggtcagaccctgagggactctagatgcttatcgctctggcagtgcagttgttttaggcaaaaatgcccaaggttttcctgtcgttcgagtcgaaggcgtaaccgggacaaatgtaaatattggagcggggataaacagtcagccaacaaatgtttttgtaatcaaaggaacgaaaagccctagtattgttcctacaagtcctaatcctaaattggtggaatagtatggatgtaattcttagaaatcaaataattgtcgcattgatgcaggcgctgttaggcgcaatttcccctaattttagagccgttataattgatttttcgcagggggtggatgtaaggtttttcttggttgaagatttaattgaagatgttgatgaaatcgatgatgtaattacagagcttgactcgctcgtaatggctattaaggcgctgccaataaagtactgtattgctgtgggagaagaaaggatcagcttttctggtgataacgtgattccgatttatattaggcgcgagtaattggtgcaaatggaatttcaattacgattgaatcaaagattgccgatcaaatgggtaaacggggtcgaacggaaagctctatacagtctgtaattgatcgggtaaacggggtcagacccagagcgggtaaacggggtcagacccagagggatcctcatggcgtctttagtatggacagaaaagagattttaggcgctgtcgatgaggcatggctcaagaaaggtagtcctgtagtcggggatccgggtgcatatgttgtcccgatgggccgagcgattgggacttcgggagaaacgagtattaaaattattgttcggcctgggaccagtcaggacattaccgcctatactgttaaatagagaagttttatatgttgtgtccaaggtgtgagcagggagatattgtcaaggctaaagttatagctgacgacagtagcttgttcgtatgtcaagagtgcgaggcctcatggtttttatacgaagatattggggtcagggaatttttcgactatggggcttatatggaaagtgtagggctgaaaccattatggagtgagttgataattattcctgagtagttgcaaaagccacagcggacttttaccgccggctcggcttcagcatatttggagaactcaaagattacccggtcgctggatacaatcggttttttatgcagaaaagatttggtctcgacaagcataacgctagtcgtactcagccttgaggcaatgacagcaaaaatctaagcaaggtgtgttacccgcgatcgatcgtcgccattcctttccagaagaacacgcaggacgtggtgcatgccttgacccgcagtaccctggaagaagcggtgcaacgccgattgttgtaatgcgtggtcaagtcagttcaacccgaacgtcgatcagccgtgaccggcgttcagcttcctatcaagtcgtaagaattgttcccggtaatatgtaggtcatttcgttttatgcttttccagtccttccaggcacctgctgtttcatccctgcactgttttatagttcacggagcaatccaccacggcagggagccgccccctcatgcatacccggaaaaaatccccccggcgccacaacccacaacccccgacccttcattccggccatcgcctgcgtctggtgctcaacacctacggcattccgcccacggcctttgccgaatggatgcgcgtcagcccgcagtgcctcaacaattggttttcacgcgggctgccggtggatcgcgtggagaaactggcgacaaccttgagcgtcagcaaagtgtggcttgagaccggcgagcgcggactatgacagtggcggggcggccaattcgccgcccctacttcaacggtcccaccacctgccggtatttttccactccctgtggcgtctgccgcaccaggctgatctccagtcccagcgggtcttcacggcgattgccactcaactgccgccaacctttgtccgcttcccatacgcgtacctgcaggtcactgacgccggtcagcaccaccacgccgtcctttgccgccggcagcgggtagcggtcccgcgcgggggcggcagcgcggtagagtgcgtcgcccttgagccaccaacgcacccgttgcaggccatcgccggccgctggggcgctgcggatcacgtccaggcgaaagcccttgctgtcggagctgcgcacggtcacggcggccagtccctctgtttgggtggcttgcgggggcgtcagttcgacactggcacgcaggcttatatcccgttgcatctggttcagcgcgcgcagcaacacttcggtctgttcggtgcttgcctgcaaatgctgatcggcgcgggtgacgctgtccagtccgcgccaggcgatcaggctgaccacggccatgagcatgatcgccaccatcacttcgatcagggtaaagccttgctgggatctgttcatggttgactcactacgcgcatcaagccggcggcgtcgcgttgcaggctgaggctgtgttggccgtcggacagcaccacacgcagcggtgggttgatccattcagcgttgagcaccagggtttgccggggttcgagacggatctgcatcggcgtgctttcccacaggcgtgggcgcagctggtcgtcgtgtttaaaggtgtcgaggccctggccgtcgtcccgctggcggttgaagcgaaagcccttggcatccgcgcgccaggtgatggggcggccgtcggcgtgggcttcggcctgggcgacttgcagcagttggctcaggcgctcggcatccttgcgcaacaggtgcagcgggtcgggcttgatggtgaggctgatggcggcgctggcgatgccgatgatcaccagcaccaccatcagctcgatcagggtgaagccttgctgtttcatcgcgggctacctggagaactggggagtgtgtgaaataaaagcgtgcgaattgacctgtaggctggtgcgacggacaaacaggaggtcctccccatgacatttgcccctcgtttcaccctggcccacggtgtgcaggctgtgggtgtgctggccgcgctggcgggtgtggcggtatggacgccgctgctactcaccagcgccgaatcccacaccccgcaagccacgccccaggcactggcggcgcgcagtgataacccggcgctgcaatggttttccaatgtgccgacggcgttgcaggtcaaggtcaccggcgtactggcgggagcgcggggcgcggtggcgatcctcagtctgaatgacggcccgccgcgcagctttctgctgggtgaacggctcagccccggtgtgcggctcacggccattgagggcgacggggtggagatcgagcgcggcggcgagaagctgcgcgtcaacctcgacaagttgccgccggggcctgcgttgccgctgctcactcggccatgacctgggtgtccagccgcgccaggggcggcgcttcgcggctggcgtcgagcacttgcaggttgacctggaacaggcggccgtcggcgttgatggtctgctcgcagcgcagtttcaggcggccttgatcgcaagtgacgatctgcttgccgctgcgcaggtggccttccaggcgcagttcggcgaggcgactctgcgccgccagcaacgcgatggatttgtctcgcagcaggccgttgctctgggtcatcaacccggccacgcgcacggcggcggccatggccacggcgatgatcgccagcgccaccagcacttcgatcagggtaaaaccttgctccttgcgacggccgtacatggcgctctcaaagccgggaaacaggcccgcagactagcgccggcagttgaccgattggcgactgaaactcccgaggattttcaatacgactgacatgtgttcttgcaacactgcgccacgaattgcactcaagccaaggaatgtcgagatggatatcgcgcgcctaacgtccccattgccaggccctcgcgggcagcgtggcttcaccctgatcgaaatcatggtggtggtggtcatcctcgggatcctcgccgcgatggtggtgcccaaggtcctggatcgcccggaccaggcgcgggccacggcggccaaacaggacatcggcgggttgatgcaggcgctgaagctctatcgcctcgatcacggcacgtacccgagcatgaaccagggcctcaaggtgttggtggagcgcccggcggacgccaagaacagcaactggcgcgcctacctggaccgcctgcccaacgacccatggggccacccttatcactacctcaacccgggcgccaatggtgaggtggacgtgttctccctcggcgccgacggccaaccggatggcgatggcgtgaatgccgatatcggctcctggcagctctaaggcccgccatgaaacggtattcgcccccagtggcgaagcagcgcggcatggcgattatcagcgccttgctgatcgcagcagtggtggcggtactggccggcgccatgctcacgcgccagaccgtatttacccgcagcctcgaagccgaacagctgcgcatccagggccaatggttgttgcagggcggcctggagcgcagccgacagctgctctgggacgcgcgccagaaggacgtgctgacccgtcttgatcaaccctgggcgcgggcccaagggggggccttcgaggggcggatcgaggacgaacagggcaagttcaacctgcgcaacctggtcagccgcgagcaggtggacactgagcaattgcagagcttcgaacggctgtgccgcctgatcggtgtcgacccgacggtgagtcggcgcatcagtcagcgggtgatcgcatcttatgaaccacccgccaaatacccgatgctgcgcagcctggatgagttgagcgggatcgaaggcctcgaccccctcgtgctgcagcgcatgcaggcctatatcagcgtgctgccgggcccgacctgggtcaacggcaacaccgccagcgccgaagtgctcagtgcagtggtgccccagctcagcctggcccaagcccatgggttggtggccgagcgtgacagcgggcagtggtttatcaaccggggtgacttcgtcaaccgcctgcacttgccgcaagtggcggtggattcggtgcaggtgggcattaccagcgagtggttccgcgtgcagggccaggcgcggcgcgagcagcggcgagtcacccttgacgccttgttgcaccgccctgaagaccgccagccacgggtgatctggtcgcgggtgggcgtatgaaacgcttgcgcattggcttgccgccgctggatcaattgagcgcgcagagccaggtccggttcgcctgggtggagcgaggcgcggtcattgaagagggcgacgccagcctggcgcagttgggccagtcgcgccaggcggcggactgcttcctgcatccacgggacagcctgctgaccagcctggagctgccgccattacccgcggcgaagaccgctgccgccgtggcttgtgccgcccaggcgttgatcctcggcgcggttgagcagatgcaggtcgcccacggcccgcgtgaaagcgatggccgcgtgcaggtggcctgggtacccaaagccgggctggagcggttggcgcagttgccactcaagctgcgcggcctgtacccggcgccctatgcactaccggtgggcgcggcagtgttggataacggctacctgctgacccgtgacagcctgcaacaaggcacggtgcacccgctggggttgcaggcgctggacctgccattggtggatgcggcgcagcgttggagcgggccggtgcccacatggggcttgcatggtcgcctcacacagccctcgaccggcggatggggcagggcactggcctgcgtggcgctggccatggccatctggaccctgggcctcaacctgtacgccgcccgccaggtggagcaaggccagcgactcaaggcgctgatgagccagcaggtgcgccaggcgtttccggcgttgccggtagtgctcaaccccttgcaacaggcccgccagcaattggccgcacgccagaccggcgcggccgccgacccgggccaacgcttcccgggcctgctgcaactggtgggaagcaacctgccgttcatggtcggcagtgtcgacagcctgacgtttgaacaggggcgcttgcgtgtcgagctgctcgccgacagccgtaacccgaccgtcgaaggtgaatggcaggcggcgttggcccaggccggtttcagcgccagccgcgatggccaggcctggaccattgctcccgcgcaagccgcagaaaaaaccggagccggcgatgaataaagtccagcgactgcgcagccaggcccgggtgttctggaacggcctggccctgcgcgaaaaacgcatgctcggcggcgccgggctggtcctggccagcctgttgacctggctggtgctggtgcagcccgcgttgaagaagatcgattactggcaagccgagacccccaagctgcgcgcccaggccgcagccttgcaggtgttgttgcaggacgtcgccgcgcccaggccgggtgacgaggccacattgcgccaggcgctggacagcgccgggctgcaagggcattaccagttgcaggcgctcgaacccggcggttggcgcctgaccttcgacaacgccccggccgatgcggtggtgggctggctgttgggcaatgcccgtttgttttccctggaggtgtccgaggcgcgtttgcagcgcgtgctcgataccgtcgacaactcggccggcactctgtccgggaccgttcgcatggatcaggcgcttggcgctaaggaagcttcatgaagtggtcagtcccccctttccgtatggttgcgccgctgctggtgctggccctgagtgcgtgcagcagccaggacgcgtccaagccgttgctggtggacagcgaactcggccaacccctggcggacacccgtcgcagtggcgagactgttctcgaccgccagagccaacccgcgcccaaagcgccggtacagcaccgcgtcaccaacagtgctcgcggccatgccccggcagctgtcaaggcacgcaacccgttgggtgaccagccggtgcaactcaattttgtcgacgccgacatccaggcggtggtacgtgcactgtcccgtgccaccggccagcagttcctggtggacccacgggtaaagggtaacctcaccctggtcagcgaaggccaggtaccggcgcatcaggcctacgacatgctgctggcggcgttgcgcatgcagggcttcagcgtggtcgatgtgggcggcgtcgcccaggtggtgcccgaggccgatgccaagctgctcggcgggccgatctacagtgccggcagcagcggcatgcagacccgcacgttccgtctgcaatacgaaaacgccgtcaacctgatcccggtgctgcgccccatcgtgtcgccgaacaacccgatcaacgcctaccccggcaacaacagcattgtgatcaccgactacgcggaaaacctggcgcgggtggcgcagatcatcaatggcatcgacacccccagcgccatcgacaccgacgtggtgatggtgcaaaacggcatcgccgtggacatcgccgccatggtctccgagttgctggacacccagggcgccgaccagacccaaaagatcaacgtgatcggcgacccgcgctccaactcgatcatcatccgctccggcagcccggagcggacggaactggcgcgcaacctgatctacaaactcgacaacgcccagagcaaccccagcaacatgcacgtggtgtacctgcgcaacgcccaggcgggcaagttggcccagtcattgcgtggcttgctcaccggcgagagcgattccggcgtgagcgacgatgcccgtggcaagctcagcgccatgggcggcaatggcaagaacaccgcccaaggcgcgagcaacgcgcaaaacagcagcggcacccccaccggcagcggcgtgcagtcgggttatggccaggccaccggttcgaccaccggcaccaacggcaccgccaaggatcaggacaccgcgttcagcgccggcggcgtgacgatccaggctgacgccaccaccaacaccctgctgatctccgcgccggacccgctgtaccgcaacctgcgcgaagtcatcgacatgctcgaccagcgtcgcgcccaagtggtgatcgaaagcctgatcgtggaggtcggcgaagacgacgccaccgaattcggcgtgcagtggcaggccggcaacctggggggcaagggtgggtttggtggcgtgaacctgggcggcagcggggtgaacagcgcgccgaccagcaagaccagcatcgatgtattgcccaagggcctcaacgtgggcctggtcaacggcaccgtggacattcccggcatcggcaaggtactcgaccttaaggtgttggcccgtgcgttgaagagcaagggcggcaccaacatattgtccacgcccaacctgctgaccctggacaacgaagcggcgagtatttttgtggggcagaccattccgtttgtcaccggcagttatgtgaccggcggcggaggcaccagcaacaacccgttccagacggtgcagcgtgaagaggtggggctcaagttgaacgtgcggccgcagatttccgagggcggtacggtgaaactggatatctaccaggaggtcagcacggtggatgcgcgggcgtcggtggaggcgggcacggtgaccaacaagcgggcgatcgataccagtattttgctggatgacgggcagatcatggtgctcggcgggttgctgcaggatgggtacagccagagcaatgatgcggtgccgtggttgtcggatattccggggttgggggcgttgtttcgcaatgagaagcgcagtgtgaacaagaccaacctgatggtgtttttgcggccgtacattattcgggacagtggggcggggcgcagtattacgttgaatcggtatgagtttatgcgcagggcgcaaggggggttgcagccggagcatagttgggcgatgccggatgtgcaggcgccgcagttgcctgcggtggagaaggcgattcctggtggccggccttgagcgttttgaccgtgtacatatctattccttcggtaacggcggcttatggttccgcccttacggcggctcacttttggaaaggcccaaaagtaagcaaaaggccttcgccccaccactcggcacctcgcctaggctcggtgtgccctcactccagcttgaatccgtgggccgccgccacgcgccatccatggcgcggggcggctaacccggcgtcctgccgggttacccacggattcaagcctgcgttcggccagcgtggttttacggggcgccgaagagcaagagcaagagcgactcgcttcgcatcgtggatacgttttttgttttgtgttgccgccctactgtggcgagcgggcttgccccgcgttgggctgcgaagcagccctaaaaccagtgtgagcgccgcgttcatcctggcttcccgcgtcatcgttaacgaccatcgcgggcaagcccggctcctacaggggaacacgttcgcttccacgactcggtcggctattcggccgccgcgctttgcttttgattttgatcttaggcgccccgtcaaacacgctggccggaattcggcagggatttggggggtaaaccggcagggatgccggtttagccgccccgcgccatggatggcgcgtggcggcggccccccaaatcactgtcggattacgggcacaccgagcctgggcgaggtgccgagtgttggggcaagagccctttgcttactttggggcttttccaaagtgagccgccgtaagggcggaaccctaagtagccgttaccgcagcaacggatatgtacacctacaaacagggccaaaaccatgagcctattgccctacgcctgggccaaatcccaacgcatcctcctgcgccccaccgaagcaggccacctgctgacggtgtgcccctcaacccccggctggtccatcagcgaagtccaccgccagttcggccaggcccagctcgaacaggtacgcgacgacgaactcgacggcctgctcaccgccgcctacgccgacaccggcagcgccgccgccgtggtgggcgccgccgaaaacgaggtcgacctcgaccgcctgatgcaagacatgcccgaagtcaccgacctgctcgacacccaggacggcgccccggtgatccgcatgatcaacgccttgctcacccaggccgcccgcgacgaagccagcgacatccatatcgaaccctacgaaacccattccgtggtgcgctaccgcgtcgacggcaccctgcgtgacgttgtttcgccgcgcaaggctctgcatggcgcactggtgtcgcgcatcaagatcatggcccaactcgatatcgccgaaaaacgcctgccccaggacgggcgcattgccctgcgcgtcgccgggcgtccgatcgacattcgcgtgtccacggtgcccaccggccatggcgaacgcgtcgtcatgcgcctgctggacaaacaagccgggcgcctgcagttggagaccctgggcatggagccgcagctgctcgcgcgcctggatacgctgatccgccagccccacggcatcgtgctggtcaccgggcctaccggcagtggcaagaccaccagcctgtacgccgccctggcgcggctggatgcgagtaccagcaacatccttaccgtggaagacccggtggagtacgacctgccgggcatcagccagatccaggtcaacgccaagatcgacatgaccttcggcctggccctgcgcgcgatcctgcgccaggacccggacatcatcatgatcggcgaaatccgtgacctggagaccgcacaaatcgccgtgcaggcttcgctcaccggtcacttggtgctggcgaccttgcacaccaacgacgcggtgtcggcggtcaaccgcctgatcgatatgggggtggagccgttcttgctggcgtcgtccctgctgggggtgttggcccagcgcctggtaaggcgcctgtgcccgcactgcaagcaggaagaccccgctgcgcccggcacctggcgcccggtgggctgcgcgcagtgcaaccaggtcggctacagcgggcgtaccggtatccatgagttgttctgtgtcgacgacgcggtgcgcagcctgatccacgagggtgccaacgagcaggacctgcgcctggccgcgcgccgcgccgggatgttgagcatgcgtgaagacggtgaacgctgggtgcgcagcgctgccaccgcccccgaagaaatcctgcgtgtgacacgggacgcctgatgaatcgctatcgctacgaggccgccgatgccagcggcaaagtcgaggccgggcatgtggaggctgacagccagagcgcagcctttgccaacctgcgcagtcgcggtttgaccgcgttgttggtgcagatcgaaggcaatcagctggccgcgacgggcagcagcctgttcagcgccaagctgtcggacaacgacctggcctgggccacgcggcaactggcgagcctgctgggcgcaagcctgccgttggaagccgcgctgagtgccacggtggagcaggccgagaaaaagcatatcgcccagaccctggcagccgtgcgcgccgatgtgcgtggcggcatgcgcctggcggatgcgttggcggcgcgacctcgggattttccgtcgatctaccgcgcgctgatcgcggcgggggaggagtccggtgacctggcccaggtgatggagcgtttggctgactacatcgaggaacgcaacaacctgcgtggcaagatcctcaccgcgtttatctaccccggcgtggtggggctggtgtccatcggcattgtgattttcttgctgagctatgtggtgccccaggtggtcagcgcgttctcccaggcacgccaggacctgccggggctgaccctggcgatgctcaacgcgagtgacttcatccgcgcctggggctggctgtgttttgccgggatcgtcggcgggttctggagctggcgcctgtacctgcgcaatcccgtggcgcgcctgaattggcacagccgtgtgctgcgcctgccattgatcgggcgttttgtactggggttgaacacggcacgattcgcctcgaccctggcgatcctcggcggtgccggcgtgccgttgctgcgtgccctggaggccgcgcggcaaaccttgtccaacgaccggctcgaccaatgcgtcagcgatgccaccgccaaggtgcgcgaaggcgtcaacctggccccggcgctggcggtggaaaaggtcttcccgccggtgctgatccacctgatcgccagcggcgagaaaaccggctcgctgccaccgatgctggagcgggcggcgcagacgctgtcgcgggatatcgaacggcgtgccatgggcatgaccgccttgctggagccgctgatgatcgtggtgatgggggccgtggtgctggtgatcgtcatggcggtgctgttgccgatcatcgagatcaaccaactcgtcacctgactgtgggagggggcttgcccccgattgcgcagagtcagtcactacatctttggctgacccactgcaatcgggggcaagccccctcccacatttgaactgtgtttattcaatgggtttttgtgcgcacctgatgctgccccgtccaacctcgggttcctcattccgtcacatcccgacagcccatgccgcctccagccaaacgcgctgaaacctcgctgtcacctgcgtccaaagcgctcggaatcatgaccaaaacacccgagaatctttttaaaaatcaaggtgttcctcccgaggttttttcctacaaacgtcatcggaaactgcgaatttctctcccatggttttcacccctggccacccccgcaagacggcttgggaccgaagccatggcgtcatgcaagagccatctaccccaaacgtacaaacacgacgaaaggagattcttcatgtttaagcgcaacgttctcgcggtatccatgaccctcgctgcactgtgctcggcccaggctgcaatggctgacatcaacggcggcggcgccactctgccagaaccgctgtacaagactgctggcgtactgactgccggttttgccgagtacatcggtgtcggcagcggcaatggcaagtcagctttcctgaacaacgactacaccaagttcgtcgccggtgtgaccaacaagaacgtgcattgggccggcagcgattccaaactttccgccgctgaactgctcgcttatcaaaacaccaagcaagccggttggggcaagctgatccaggtaccttcggtggccacttcggttgccattcctttcaacaagaccggtgccggtaacgtcaacctgaccgttgaccaactctgcggcgtctactcgggtcgtctgactacctgggaccagatcaccccaggccttaccggtaccatccaagtggcttaccgtaaaggcgccagcggcacgaccgagctgttcacccgtttcctcaatgccaagtgcaacccgacattggaaaacggtactttcgccgtgacccagactttcgaaagcagcttctcccgtggcctgccagcgggtgcaatcaaccctctgcaagaagtcaacccagccagcactaccacgcctaaagaaaccttcaaggacaccagtgaaggtgtgatgggcttgctgaacaacgctcagaaccgcatcacctacatgagcccggactgggctgcaaccagcgtcgccggcctgggtgacgcaaccaaagtcgccacgatcggtggtgtttcgcctgcacctgccaacgtttcggccgcgatcaacgcgatccagccgccagccgtcgccagccgtggcgaccagaacgtctgggtgcctgtgttcgcagcgactaccaaccccaacgacgccagcgtcgtgcaatacccaagcaccggctacccaatcctgggcttcactaacctgatcttcagccagtgctatgccaacgctgatcaaaccacccaagtgcgtgcgttcttctccaagcactacggcgctttgtccaacaacgacacggcgatcaccaacaaccgcttcgtaccgctgccagccagctggaaaaccgctgtgcgtgacaccttcgtcaccgcgtccaacggtttgagcatcggcaacacctctgtttgcaaccaaatcggtcgtccgctgtaacccacgtttcaacgacccgcgacaccgatcagcaacggcctgtgccgttgctgatttttttgcgttaacagccccatgtgaactttccatgacagaagttcagtcccgtgcctcgacaaccgcctactcctcatacgtgagcctgtcttgctgcctgtgcgcagacaaatgtgtgatgacaaagaaggaagactccagatggtccgctgcaaatcaccggttaacctgaaagcccaagagactatcctgcgcctgaagccactggcccacgccatcgccttgttgatggtggcaggcaatgcccaggcggccacggcgttcagttccagctggtttgccgacaaaggcgcgacccaggcggcgacggcggcacggatcagcgcaggtcaggtaccggggattccgtcgctgaacgaacaggcccgggtcaaccagcagttggcgcgttccatcagcacactgaacaccagtgtcgcggccattgctgcgcaacaggcggcgcaggcagctgggcgccaagcggcgttgggccaggtctcgaccattcccgatggcttgggcaagggcggcctgcaggtcgataacagcctgacccagggctggatcaacgccaagaacccgacccagagccagtccggcggcaagaccaccgtgaccatcgagcaaaccgccgacaaggcgatcctcaactgggagaccttcaacgtcgggcgcaacaccaccgtggatttccagcaacagtccaattgggccgtgctcaaccgtgtcaatgatcccgattcgcgccccagcgagatccaggggcagatccagggcgccggcaccgtgatgatcgtgaaccgcaacggtgtggtgttcagcggtaccagccaggtcaatgtgcgcaacctggtggccgcggcggcgaacatcaccgatgaacagttcacccagcgcggtatctatgtggatgccaatggcacccaggcgaccttcaccgatgcggcaggcaaggtccaggtgcagcgcggtgcgttgatccagacccataaggctgcgacctccactgacgccggtggttatgcgttgctgctcggttcggaggtggaaaacgccggtaccatcatcaccgccaaaggccagaccacgctggcagccggtgacagcttttacatccgcaagggcgtcgggactgccggcaatgatcggtccaccacccgtggcaatgaagtcgccaccagcctcaaggccggcagcacggccggcaaggtcaccaacgaggggctgatcatggcctctacgggtgacatcacccttacgggtcatcaggtgcaacagaacggcgtagccctggccagtacctcggtggacacgcgcggcacgatccatctgctgaactcggcaaccgatcaaaccggcagcgtgaccctgggcgagggcagcaccaccgcgatcttgctggacgccagcggcagcacagccctcaacagccagaagggggccggcctggaaaaattcgatggcctggccgccaacctgatcacgggccagttcaacaacctcagcgcggtggccgaccgtaccgaccagtcgcgtatcgaaatcgtcagcggcggcaccgtggacttccagaaaggctcgatcaccctggccaccggcggccaagtcgcggttagcgccaccggtcgcagcctggtgcgcgatggcgcgatgatcgacgtgtccggtgccattggcgtcaaggtgtcgatggacgccaataacatcaagatcaacgtgcagggcaacgagcagcgcgatgcaccggtcaaccgcgatggcgggcaactgatcaacaatgatgtctgggtcgacttgcgtgaactggtcttcgtaccggcaggcaccaatggttatgcgacagaccgctggtacaccgcgggtggcttgcttgaagtcggcggttacctcggcacacagggtcattcggtgggcgaatggatggcccagggcggcaccgtgacctttaccggcaaggaggcggtgacccaacagggtgcgcagatcaacctgtccggcggcaccgtggatgtgcaggccgggtatgtgcgtcagacctggctcaaggggccagatgggcggttgtacgaactgtcgacggcaccaggcgacattctctattcggggctctacaaaggttatgaagacaccagcacgcgctggggccagaccgactactactacaacccgatgatcgccacgcaacgccgttacgagaacggttacaccgtgggccgcgatgccggcaagctggtcatcggtacgagcagcgcggtgctcgaaggccaggtgatcagcgatgtgttccagggcgatcgccagacccaggcgccgaatatcaacctggacggttaccagcagtcccagaaggccaaagcccagcgtgcacagttgatcattggccaatacatcccgatctacaacaaggccaccggcaccctgcgctacgccctcagtggtaccaccgaccaggtgctgatcgacagcaacacgcagaaaatcgcagacggccttgacctcactgccgcattgccggcggaccgccaaggcaagttggtactcgacagtgaccagctcaatggcttccagctgggggcgatcaaggtcggcgccaagcagcagatcaccgtcaacggcgcgctgaaagtggccgatggcggcgacatcaccctgttcgggccgggtgttgccatcaacgccaacctcacggcccatggcggcagtatcaacgctggcaacattctcacccaggttgaccgcgacaaaggcaacgcggtgggggacgtgatcctggcgggcagcgggcggcttgacgtggcctccggggtcaagctggaggccggcggacgctggaataacctcgcgctggaccccgccaaccgtgaaggtgtggcgtatatcaatggcggcaaagtgtcgctgcgcagcaccaacgtggtcaacctcgctgccggtagcctggtggatgtgtcctcgggcgccacggttggcgaagacggcaagctcagtggtggcaagggcggcgacgtgaagctcggcggcctcggcagcctcggcctgggcggcgaggtgcgtggctatggcgtcaacggcggtggcaccctggcgttgcaggcgcacaaggtgttgatcggcacaggtgcggtagatgccgacaccctgcagttgggcggcgactttttcaacaaggggttctcggcgtatgacatcaccggtaatgaagggctgatcgtcgcgaacggtacccaggtcgatgtgaacatgccggtctaccatgtgggcgagcaggccaccggcgcgccgaccggcagcgatgcggcaagtgcgctcgaacgctggaccccgccgctgtaccaggaggacgccaccaagggcgtgctgacccagcgccgtggcgcgagcttgagcctgagcgccggccatacgctgtcgacggccgcgcagatggcgacgacggcactgaccgtgggccagggggcggtgatcaacgtcgatcccggccaggcgatcaacctgcagagcatcggccagctcaccctggacggcacgctcaacgcgtggggcggcagcgtcagcctcaagggcttgaccacggcggactcggaaaaagtcgaggcgatcggccatgggcgttcgatctggatcggcgaacacgcgctgatcgatgtggctggccgtgccgtgacggctgtggacaatcgcggcggcatttatggccaggtgcgcaacggcgggacgatcacggtagggggcgacattgaccccaccaccggggttgccaagaccagcaacctgttcgtggtcgtgcgtgagggcgcgcgcctggatgcttccggcacccaggcgttgctggatgtgccaggccaggggcgcacgacggtggcaagcaacggtggcaccctcgcttttgcgtccagcaacggcctgtacctggatggcagcttcaaggctaatgcaggtggtgccggtgcggccggcgggcgtctggcattggcgctggaggcaccgtattacctgcgcagcctggccaccaaccgagtgttaccggtgcgcgagctggttctgagccagcagtaccaggcgcaagcgctgccaggcagtgccgaagcggcggccgatgcgttgacctacggtcatgcccggcttggcgtcgaccaggtgacggcgggcggctttgatagcctggccctgttggtcaatggcgcgctgaacatggcgggtgacgtttcgctggccatgggccagagcctggaggtgtactcacaaggcatagggttggcgaagaacgcgcccgtgaccgcccaggttcatcttgcggcgccccatgtggtactcagcggcatgctcgcgccagatcggaccggcatggagagttacatcacgccgtacctgggtgacccggtatcgactgttccggggcagggccggttcacggttgacagcgatctgctggatattcgcgacaaagtcacgtttgccctcaaccagggctttgaccgggtcaatctcaacagccgtggcgatctgcgttttctcgccggacgcgatggcggcgtcacccccaatggcttcagtacggtcttgcagtctggcggtgacctgaccttgcgggcctcacgtatctaccccggcagcgaaatcgccgcgcaagtgctggtgggcctcaccggcagcacggccaccggtttattgttcgatcccgcgcgtaccctcaccctggaaaaaaacggcgacgccagcgtggtcgctccgtattcgattttcggtcgcctgcaattgggcgcagcgaccatcaagcagggcggcgtgttgcaggccccgttgggtctgatcgaaatcggcaaccagggcagcacccgtgtcgaactgctgcccggcagcctgacgtccgtgagcggcaaggggttggtgctgccgtacggcggaaccgtggacggccaggtctaccgttacaacggtaagaccgtgaacttcatcggccagggcggcgtgcgcaatggcaacggcgacctgacggtcggcgtgatcctgggcggcaagtcggtggcggtactgcccgacgctaccctggatttgtccggcggcggtgagctgctgggggccgggtttatttccggccgggggggctctacggatgcgcgctataacccactggtgcagttcggcgccaacggcgggtttgtgctgccgggattgagcaccaacccggtgtacgccatcgtgccgggcgcgcagccagggtatgcgcccgtggccgccgagggcggtgcggtagcacctttggtcggccagcagatcaccatcggcgcgggtgtgccgggactgccggccggcacctataccttgatgccgtccacctatgccctgatgcccggcgccttccgggtcgagatcaatggcctggcggggaccggcagcggtgccggtgtcattgcgatgcgcaacggctcatggtccaccgccgggcagctgtcgatcatcaacaccgggatccgtaacagccaggtcagccaagtgatcatcacgtcggccgataccttgcgccgttattcccagtacaacgaaatgagttatgcccaattcgccgtcggggatgcggccaagctcggtgtgccacgggcgctgatgccggtggacgccaaaacgctcaagctggccctggatgccggcggcggcagtgacaccttttcgttcaagggcattggccggttcgaagcagccccgggtggctatggcggcacggttgcggtcaccagcagggtgcccaacggcgcaatacagattgtcgacgccaacagcccgttgaccgaagcgttcagcggtgtgacggtggatgcgcaaagtctcaacgccatgggtgccaagcgtttgctggtgggcggtttgtcgatggtgctgtatgggcagagtggcaacaacgtcggatttgccaccagcatggccgggaccatcaccctgcgttcaggcgcgaatctggtggcgccggaagtgatgatggtttcgcgcaatggcgatatcgtggttgagcaaggcgcctccatcaataccctcggccagggcgcggcgtcttatgattcacgcgatggctttgtctacagcagcgcgcccaacatgctcgtggtctccaacggcttgatcaatgtgctgccgtatccggaaacggccggcaggggcggcggcatccggatcggtgcttgcgtcacgagcccttgcagtgggcagactgcgttgtattccgaaggcagtatcgtgatctcgaccacccaggccctggagctgaatgaccaggtgcgctacggcactcgccacctcgcactggccttgagcaacatcaacgtcggcagcgtcgaggccctggccgatgccgccgcacgcaacgtgttgccggcgggcttgaccctcaaccagcaggtgatcaaccgcttgctgcgcggtgatacccagtctggcgcaccggccctggaaaccctgcaattgtcggcggcccaggcattcaacttctacggcaccacgacgctggacacgtatgatgcacagaccggcaagtcgctgctgaacaacttgttgctgtccacgccggcgatctacggcgccggcaatgccaatgacgtggcgacaatccacaccgccaacctgatctggcagggcgccgaggcgcctcccggcgccgtggttgccggcggtgccggcaccggcagtgggcgcctggatatcaatgccgagcgcatcgagttcggctacggcgcctttgcccagcccagcaccaccaagactttcgaccgcctggccctgggctttgccaacgtcaacctgaatgccagtgaccgcattacggccaactacaagggcagcttgtcggtataccggaacctgaccggctacgacccggtcaagggcttccagtacagcggcggcaacctcaatatcctcacaccactgatgaccggtgaagccggctcggtcaaccgtatcactgccggcggcgccattgatgtcgccgccgccgccggtgcgcgggggaccgccaatggcatgggcgccgagctgtccctgcaaggcgacagtgtgcgagtagccagcgccgtggtattgcccagcggcaaggtcaagctcggcgcacggggcgacgtggtactgacggacggcgcattgatcgacgtcgccggacgctcggtggtcttcaacgacctcactcaatacggctgggggggcgaggtattgctcgacagccgcagcggcaatgttttgcaggcggcgggttcgaccatcgacctgtcggccaaacataaccaggccggcaaactgcgtgcggttgccgttgatgcggcaggcggtattgtcgacctgcaaggccgcgttctcggcagcagcaccggctactaccacgctggcggcaccttgatgccttatacggcgggcagcgtggaaatccaggcacaacgcctgggcggcaatggttcgctggaccaacagtttgccgacctcaaccagcgtctcaatgccggccaggtgttcggtgcgcgcagcttccagctcaaacagggcgacctgaccatcggcgaggggctcaaggcgggcatcatcaacgtctcggtcgacaacggcagcctgcgggtcactggcctggtggacgccagcggcgaacgcgtcggcagtatcagcctggccggcaagaacggcctgaccctcgcgggcagtgcggtgctggatgcccacggcagcaagttgcgggtggacagctacggcaagatcatcgattcgccgaaccgggccatggtggcgctgagttccggtaacggcgtgttgaccctggccgaaggcgcgcgcatcgacctgcgccacggcaccgcagccattcgcggcaacgatgggcgcaatcgcggcaccctggagctcaacgcaccgcgcctggccggggccggcggcgtcatcaacgacatcgccatcgacgcccatggccgcgtggacattcaaggtgctcgcgcgatcaccctcaatggcatggccacctatgacgatgcgcccgagaaaaccgatccaaccgccagcggcaaaccgtaccagcaaatcacccaggattatctgaacgacaaacatagactgagcacggactttatcaacgcggcgctgctcaacaacaacctgctgcaaaacaagctcgccggcttgaataacgacacctacggcgacaccttccacctgcgtcccggtgtggaaatcgtcagcaagacgccagacggcgacctggtggtgcagggtgacctggacctgtccggctatcgctacgccagcctcaagtcgccgacccatgaaaagaccgaggccggcagcctgaccttgcgcgcggggggcgacctgagcatctacggcagtatcaacgatggctttgcgctgccgccggagactgtagacgacaagggctgggtgctgttgccgggggttgacttcaccggtggcgatatcgtggtgccggggcagggtgtgagcctggcaatcggcacggccttcccggcgggtgtggtgctcaactacgacctgccgatcgccgacatcggcgtgagcgcaggcacccgtttgccggtgcgcgccaccctcagacaggacctggtgctgccagccggcaccgtgctggcggcggcggtattcgacagcacgggcaacgtgctgtttgccgctggtaccttgctgagccaggcgcagaccctggtcagcgggtcgcaactggacgccggcagtctgttgacccagaacactttgttgaaggcgatgacctggcccaagggcgtgccgctgccgcagaatttccaggcgcctggccccacccagaacgtggtgaccctggcccgcgatttgttgttgcccaagggtgcactgattccttccggtaccaacgtcaagttgctcaacgatgcgacatcggtcgagctgcgtcccgaagtggcggggcgccagggccagaactgggccattgcaccgatgctggccgagggttcgcagtcgtggtcgctgcggctggtggcgggcgccgacaccgaggcggccgacagtcgtctgttgcaacctcatcccacaaccggtgacctgcgcctggcggacagtcactacggcatgttcgccaaggagctgccgtcccaggtcgtgcaaacgtggtctgcggccggggtcgagctgctggcgagcctgggcaaggacgtcaaggtgggtgacccgatcgaacagtcgctgctcgatgagctgggcggcggtccgatcgccgatttctgtgcgggttcgccggactactgcgcggtgaagccatcgtttgtctggaccgcccaggcggtggcggacctggccgagtacggcctgacggaaggcgcgccgattaccgatgcattcctggcgcaatttaacaccaccaccacgcagttctgtgcggataaccccgcttactgcctttcccaatcggtcaaggagttcggtgcaagccccgccgcgacgcgcttcagtgtgatccgcacaggcaccggcgatctggagttgttgagcgccggcaacctgagcatggactcgctgtacggggtgtacaccgccggcacctcgtctgccgccaccttcgcgggcgacccgtacaaccagcccaagtccaacggccggggcaagaccgtgctgaacgacgagggcagctatttcgagcaattcgtcaacgccagccccaccagcctgtaccgcgcctggtatccgcaagcgggcggcaacctgaacgtgaaggtgggtggcaatctgacaggcaatatcctcaacgtcacggcttccgcgcctggtcggccaaaccctctggataccggctacgattcggccagtgtcggcaactggttgtggcgccagggcagcggcactgtcgatacgggcggggcagcgcagcccacggcctggtggatcaatttcggcagttacaccgcgaccgccacagctgaccaactggtgggctttaccggtttcggcaccttgggcggtggcgacgtggatgtacgggtaggcggtgacgccgggatgcttcgctcgctggccggcaatgccatggcggccaatgccagcccacgcagccagggcttggtgctggcggtcggcagcaccgggcgggtggccagtgatggcagcctgcaactcaccggtggtggtgacctgcgggtgcatatcggcggggcgcttaaccctgaaagccagcttgatagcagcagcttgaacggcacactggtggacctgcgcggtaacgctcaactgctgggcggcgcctcgggccggatagagttgcagtacggcattgccaataccgaccacagcccgggtgaagtgcgggcgttcgacgcgttgcaggccacccgggggctgacgcgcggcggcatggtgctggtgccgggtgatgcgacgttcagcctggcgaccctgggcgacctggcgttgcagagcgtgatcgaccccggccgggtattgctgcccaacagttcgtcatttgtccgggggcaggaacacggcccaggcaccagttggttctcgctgtggaccgggcaaacggcgatcgacctgttttccgccggcggcaacctgtcgcccaattccacggggctggcctctgacctggcggtggtctatccgtcgatcttgcgtgcgacggccgccagcggcagcctgtactacggcaaggcgggtagctcttccttgaccgacaacgattacaaattcccgttgttgcttgctccgggcgtgaacggccagttgcagttgctggcccatgattcgatctatgccggcggcacgttcgtgagccaatcggcagctgatccagcgatcatggccacgccttggcaaccggcatttgtcggcaggctcggtaccgacatcaagcctgtcgccagcaacctctcgccaaacggcagttccgacaacgtcccgcttctaccactgtttgtgtttggttccgccagcgcgtcgaccagcggttatgctccggcctccgctgcgcgtttctacgcattgaccggtgacctggtgggtgtcagcagtgggcggatcatctcgtttggggtcaaccccggcgatctgcatcaagggcagacctggtacgagggcggtggtgccgtgtggatgatggcaggccgggatattgtcagcagtggcagcctgtttgaccgaatcagcggttaccagagagaaacgtccatgggcaacctgtttgtccacaacagccccaccgatatctccatcgtgtctgccgggcgcgacatcctctacagcaacttccaggtcgccgggccgggcgcgttggagctgacggccgggcgtaatatccagatggacgacaaagtcagcgtcaccagccttggccccgtagcctcgggcgataaccgccccggcgcgagcattgtcatgcaagccggcgtcggccccgacggcccggattaccgtcgcttcgtcgaggcctacctggaccctgtgaacctggcgcagccgggtgagtcgatccagagcggcaaggtcgccaagacctacgagaacgaactggtcggctggctcgccgagcgctttggttttgtcggcggcaccgagcaggcgcgcacttactacgcggcgctccccgccgagcaacaacgggtgttcgcccgcgacgtttacttcgccgagctcaaggccgctggccgtgagtacaacagcgctggcagcgtgcgccagggcagctacctgcgtggccgcgtagcgattgcggcgctgttcccggacaaggacgtggccggcaacccgatcacctacaaaggcgacatcacgatgttcggtggcgcgggcgtacacaccaacttcggcggttcgatccagatgctcaccccgggcggcagccagaccttcggtatcgaaggcgcggcgccaccgtcgacggcgggggtgatcacccagggcgcgggggatatccagctgtattccctgggcagcatcctgctgggtcagagccgcatcatgaccaccttcggcggctcgatcatgggctggaccagcgaaggcgacatcaacgccgggcgcggttccaagaccaccgtggtgtacacgccgcccaagcgtgtctatgacaattggggcaacgtcggcctgtcgccgtcggtgccgagtaccggtgcggggatcgccacgctcaacccaatcccggaagtgccggcgggggacatcgacctgatcgcgccgctgggcaccatcgacgccggcgaggcggggatccgtgtgtccggcaacgtcaacattgccgccttgcgcgtggtgaacgcggcgaacatccagacccagggcaagtcgtccggggtgccggtggccgccagcgtcaacaccggcgccatgagctcggccagcgcggccggggcggcggcgtcccaggcggcggaagacgcggcgcgcagccagcaggcggccgcgaagcagggcaggccgtcgatcatgactgtggaagtgttgagcctgggcaacgaaccgttgccgcaagagcctgcgccggcgcagaaaacctccggctacaaccccaacagcccggtgcaggtgctgggcgcagggccgctgagcgaacaggcgcgagcgcggctgacggatgaggagcgcaagcagatcagtttgtaaggctgtggaaaggacctctcgatgtaccgttcggggcgatcaatgatcgcccctttttttgcgccggttacgggttgtccttgagggtcttgaacgactcgatgcgtttgatcagccgcgtgttcttcgccgagtcggcattgctgaacaggaaggagaagtccgacgccagcccggattttccggcaatcgccgcgtactggtggcagtcgttgcagttgtcggtctgcacgtaggtttccatggtggtgttggcgacgacgacactctggtcgctgacaaacggcccataggacagcggtacctgcacgttcggccctgggcctgggtcgttgggcgcattgggcgtcttggaccacagcacattcaccagtttgtagtactggaataccgactggccctgggtctgctgggcgaaggtctgctgcactgccgtgttcagcgcctgcatgtcctggggcgtggcgttggcgcgggtggcctgcaccggctggtcgaggggcgtgcagttgggcggcgtgtgcgtggcgtcgcactgcacgcggggcacattcggcgtgcaggcatcaccggtgcatgccgggttgttgaagctgtagccctcgggcggcgcggcaccaccgtcaggcacgttgtcgacctgctcgaaggtggtccagatgaaattcggctgggtctgggtcttgttgatgatatgcaggcccaccaggccaatcacttcctgggtgcattgcagcgtgtccgggcgttgcagccaggccacggtggtcaggtagcgcccgtacagggcgggcttgttggtgagcacgcgccaggcggctttcagttccagggcgccgagttcttcctgcggcagcgccttggccggcagttcacgcaccagcttgccggccggcagtgacaggccggcggggtgccgtttgtcgctgttctgcgccacgatcagctggttggccgcatcgtacaaaccgttgtcgacgatgtagtcgaactcggccttgcccaccttgcgctcgaaaaacaccaggttgccggactggtccgttagccaaccgccggaggcttccatgatcgaatcgggcagggtcacctgggtgccgctggacaggtggaagcggtgcttgcggttgatcgcgctttccgaggtggcggtgatgaatttacgcgcgcccgtggcaaacgccttgaggttgccggtggcggtgcagttggacggcaccagggtttccacgccccagccggacggcttggccgcgccgggcaggaagatctcgctggcatccttgtagcttgcccacactggtgccttgctcatcggttggccgggcgttgatggcacgccgaactgggctgcgctgctttgcgtatccggctcaccggccaggctcgggttggccggccagccggggttgaccggccagttcatggcgatgaacaactgccagccgaagcagttgagaaaggcctgctcggtgccgaaattgttcaccggcaggaagccgccgctggtggggtcgaacaccaactggctgacgcagctctgggcatccgaggcggcactggccggtacgggggccagccacgggagaagggcgcaggtgattgtgcagacaatacgcaagcgtgcccggcgcagcgggcgaagccatccgttcatggtcgcattccttgctcaagactttaggggcggccacccacgccaggcatgggcggccgggtggaactcaggcgctgggcaccagggccaggccgctttcccatgggtgctcggtggcactcgggttggccgcttcgttggggttgagcgcacgcacgctgaccagccccggcgccgcgttgctgctgacggtaatggtcatgatgtagccctgggtgccgccgccgtcggtctgcccgggaatcgccgaggcatccggcaggaactgcgtgacctgggccgtgacgcccgggttggagaactgcacccgtgcatccgccgccgtggtgttcgggtcggcgccttgtaccaccaatacgaactggcctgagctgccgggcgcaaagctggccggcaagtcgctgggggattgcccgtagaacaggtcaatcggcagcaactgcacgggccagggttgcgcatcggtggtgttggccgccacgcaggcacactccttgggctgggccgtgagcggcgcaggggtcacgctgagggccacattcagttcgttggcgatcacccacacgtagtcgatcggcgtgccgttgatggtgatgtcattgatcgagaaccccgcgctggtcggcacctcgaagaccgcctggagaatctggtcggagttgttcgggccggtgccggcggtgccacgggtaacgcgccagtagctgctgacatcctggccttgcgggcctttccaggtgctgaaggacttgggttgctgcaggtacaggccgatggggttggtcaacgagatcaggttgttgaccgccgcctggttggcggagaacccgatatgcgggtcggagttgcggtagttctgcccgtactgcgcgcagcagatcaggctctgctggttctggctgctgctgagcggccgcaggatggtggcggccgccgccaggtagatctcggcactcagggtgttggggccggaggtcaggtgcatcgcgccacccgacacgcccggtatgcgcacggtgccgctgttccatttgttcacggtgtcgtaggcgggctggccggtggtggggtcgagcaccggttcgccggccttgccggtcgggccgtcggcggtgtagcgcaggtacaggtcttcgagtttcacctgcgggtcgacatacgcctggtacagacccagcacggcacccgggtcgatgttccacatggtcaggaagtacgccgggttctcgctggtgaacatgatgctgcgcatgctgccgtcggggtcgcgggtgatcgaccactcgcagtattcatccagccagccccgtgggccagagggcgaaaagtcggcgtaggggccgttccagttgatggatttgcacagcacgctggggatctgcagttgggtcgcctgcgggtccgggtacagcgaatacagggtgttattgagggtgatctggccgtggtcggtcagttgcatcacctggtccagggtcatggccttgccgcccagttgcgggaccacggcggcgccgttgttgtagaagaacgtccagaggcgattgggaaagggctgccaggtgatggtcttcggcgtcagcgtgccgtagccgctctccagcgggttgtaatagcccgagcgcggtgcatcgttgaggttggaccaggggttgccgatgatcgacatctgggtccagccggtgacgttgttgttccagtcggtctcgaaggtcggcaactggtcctccaggccgagcttgttgtagtccttgggcgcttgttcggcaggggaggtgaattgggtgaagggtgtgctcatgtcggttctccagcatgggtgttggtggagcagcaaccggcgtccggagcggggccggcagaggtttggcgtgggtcgtcccacaccagttcggcgataaagccaggcagcggcgcgtatgcatcggccgtcaacacctggccactatcggagtgggtcacgaccagcgataactgcgctgcgtcggtcggtttgagcttcagtacctgggcattgcgcgcagcattcagcgcccgcgacacgccctgggtgatgcagcggcccttgtcgtctaccaaccccatgccgatgcggctgaaacgcccgacgtaatgcgggttgtcggcgcgggcgtgctgcgccgtggcgtcgggttggttgaggaagacgtcgatcaggtaggtgtcatgggtgcagcgcacatggtcgaacaccacccagggacctgtgcctgcggcctgcggttgatggcagcacgcagcctgggccgcgccgaactgtggggcgacgggcgtgccgtagtcgtagccgatgtgccggctgtcctgggccatgtcgccgagggtggtgtagcgccaggcatcggcgctggtgaaggtcacgtcattggcctgctgcccggcgaacggctgcaacaggcattgggtggtgtactgcgccgccgggttgacacggatccagacctccagcatgcgatcgatattggcgtgataggaacagaacaccgggtcgaacgcggtgtaggcgttgtcggccatgtcgccgccgatccagccgtgatagttgtcgtggggctgctcgtagagcccgtcgaaattcaatgcgcggttggggtacagattgttcggttgcggtgggtcgaaactggtgatgttggcccacggatagcctggtacaccctggggctggctgaaggtggtgaacgccagcgcatcgaccacctgctgctggaagatccggctcatgccatacaactgggtgcgctcgaatcggaaggcctcgccctgggtgtagaacagcgggttgcgctgcacataccggcagtcgacgccctcgaccggcgcggtggcgcagaccttggagcaaccatccttggccgccgcataccgcaacgggttatgccgcacctcaccggtgtgcgggtgcacgtaggtttcatcgaggaacgcctgaggcaagccggcctgggggctgccgtcgatactggcgtctgcggccatccagtcccagtagggaatcgcgcagtcgatcaacgcttccaggtacagcaggtaagcgcggtgccacagggcgaacgcttcctggtagtgcaggcaccagttggtatggatgtaggcatagcgctgccagggtgagccgctgtcggcgtcgccaatgtgcatcacgtcatccagcttggcgcggtacaggttcagtgcttcggggctcagggcgcggatgtcctggcgcacacgcttgaccgggtgtggcagcgccggtggcgggatgcgctcggccgggtcgaacggcgaaatgctgtccagccgccagccctggttgacccacaggcggaaggtttccagggcatcgagcggccagaactgctgctgatcggtggtcagcggcatgttgcgcgaggccaggtgctggtagatggtttgcgaccaggtcttgaccgaggccgggtcttccaggaacacatcgtaggcgttcatgcagccgacccaggtggcggcgacggcggcgcgctggggggcgggtatccagtagggggcgctgaacagcgccttgatatcaccggtccatgtcggtttcgcgactatcataagatccctctcatgccgccttcaggccaggtgttggccgggctgctaagctggatcgatgttaactagccactgcgcaggatttgtgcaaattggcccgtctttgcgacgtattcattgcattttttcaaggacgatttggaaccgatgacagacgccatggatttgaagatcctgggcaagttgcagaaggattgcgaccagagcctggagttgttgagcgacagcgtggggctgtcttccaccagttgttatcggcggattcgccgcatggagagcgtagggatcatcaaggccaaggtggcggtgctggatgaacgcaaattggggatccaggtgacggcgtttttcctgatcaagctggacagggacagccaggatattgaccgcaagatgcagcacatcctgtcgactcatccggagattcaggattgttacttgatgaccggggagtttgattttgtgatggtggcgaagtttcgggatgctgtggagtacaccgagtatatctatcggtttctggagacttatcgggatattccgattcggacttattcttctacgttggtggttaggacggttaagaagtcttatgagttgccgttgcagggggttgggttttgttctcggagttgagtacatatccgtttcttcggtaacggctacttatggttccgctcttacagcggctcacttttggaaaggccggaatgccggcccagccaaaagtaagcaaaaggccttcgccccaacactcggtgcctcgcttaggctcggcatgccctcactccggcttgaatccgtgggccgccgcaatgggccatccatggcccagtgcggctaacccggcgtcctgccgggttacccacggattcaagcctgcgttcggccagcgtgtttgacggggcgatcccagatcaaaagcaagagcgcggcggccttagagccgaccggattgtatggccggtactcggtcaaagtgtgggagggggcttgcccccgatggcagtgggtcagtcactgatgagtt

SEQ ID NO: 4 - DNA, 97361 bp, Pseudomonas nodulensis
agacacgcaactggaaccctatcgggacggtgtacctcaatcccgaaagggagctgacagttgtcgtgaaggtcgcctagcaagacgggagacacgacaactaccttgaaaaacgccgggggggtaaaccggcagggatgccggtttagccgccccgcgccatggatggcgcgtggcggcggcccccaaaatcactgtcggattacgggcacaccgagcctgggcgaggtgccgagtgttggggcaagagcgttttgcttacttttgcgcttttcaaaagtgagccgccgtaagggcggaaccataagccgccgttacctaaataacggatatgcccccgaaaaaaatgccccccacccaatcaaaaatgaagctttcatgacaaaagttcggtagcccatggccactcccgtctcctctgtgtaacgcgcttgagcccaccagaaaggtgagcttttcagccgcaagcaggatgccaggagtggggcgatgggaactatggaacgttactcgaaagtgggcatgcaggagctcgaccagcgcctgtcgaagatcgtcgaagcggcgcgcaagaagccggtgtcggtctatcgttatggcgcgccctgggtatggatcgtctcccaggaagactggcagggcgcccgcaaggaagtctcaagctacatcccggctggccattccctggtattgctgcgcccgcagatcgacgaagtgctcgaccagcaccgtgactggctcaccgccgaacccgcgatgtcgatccctgcgcagaccgtgctgcagatcctgctgctgcaactgctgtattcggtgcccagcgagcagcaactgcatgaacagctgaactacaacctgctgttccgctggttcgtcggcctggacctcaaccagaaggtctggagcgttcatgtcctgacgcgcgacatcgccacgctgctgaacaacccgcgtgcggtgcaactcatccagaaaatcatcggtgacgtgttttgtggcgccttgctgcacatgccggagttctccttgaacttcgccctgttgcacacctggctggcacgccacggcaacactgcgatcaccagcaattgagcaggccgcacgccggggattcggcgacggtgcgaacaatcagacagtcagggggcggtgtggagcatctgttcaaattaacgctggcgctgtgttgcgtgacgctggggagcctggcgcaaccggtgttggccgaggaagaggcggcggcgcgcaaggtcgacgtcaacgagtacttcgtgcgcggcaataccgtgctcgatgcggcgacgatcgaggaggcggtgtacccattcctggggccgcaaaagaccctgggcgatatcgaaggcgctcgcgatgcgttgcagaagatctaccaggcgcgtggctaccagtcagtgtttgtcgagctgccggagcagaaggtcgatgacggtatcgtctacctgcaagtgagcgaaaccaaggtcggccgcgtacgtgtggtcggggccaagcactattcaccggtggaaatccgcgagcaggtgccggccctggaggagggcgcagtgccggactttgccacggtgcaaacccagttggccggcctcaaccgcagcgccgggcgccaggtcacgccgctggtgcgcgaaggccagcgcccgggcacgatggatgtggatctgcaagtggaagaccagaatccctggcacgccagcctcggcctgaacaacgactacagcgccgacaccgagaagctgcgttcggtcgccacgctgggttacgacaacctctggcaactgggccacagcatttccctgacctatttcaccgcgccccaggacaccgacaacgccaaggtctggtccggttcctacagcgcgccattgaacgagcgctggaccttgcagttctccggttaccagtccgacagcaacatcgccaccatcggcggcagcaacgtgttgggcaagggccattcctacggcgtgtcggccatctacaacctgccggcggcgggaaattgggccaattcgttctcgttcggcgtcgacttcaaggacttcgacgagcagatgaaattcggctccagcagcgaccaggtgcccctcaagtacgcaccgttcaccctgggttacaacggctttcgctataccgaacaatcgcagctgggcctgggcctgaacctggtggtgggcacccgcgcgttctttggctacggcagcgatgccgaagagttcgactacaagcgctacaaggccagcgccagtttcgccgtgctcaagggcgacctgaattacacctacacctttgccaacgattggcagtcggcaaccaaaggcggcttccagctcgcgtcggggccgctggtctccaacgagcagtattccgccggcggcgccacctcggtgcgcggttacctggcggcggagcgtaccggggatgagggctacttgctttcccaggagctgcgcacgccgtccctggccaagttcctcggcagttatgtgcaggagtggcgcttctatgcgttcgccgaaggcgcgcgcatgcgcctgcacgacccgctgcccgagcaagaagacgaatacagcctggccagtgtcggcctgggcacccgcgccagtttgagcaaatggttgtccggcagcctggattggggctacccgctgctcgatggaccgaacacccagaaacaggactcgcgactgcacttcagtgtgcaggcgactttctgactttttcttccggagacttcacccatgcaacgcctattcctgagcctgttgatctgcctgggcttcgcgctcccggccaccgcccatgcctggtggcaggacgactggcactaccgcaaacagatttcggtagacaccaccgcccaaggcgccgcgatcagccaggccctgggccgcactgcactgctggtgcgcctgcacaccggcaacttcacttttgacggggtcaaggacgacggttctgacctgcgttttgtgagtgccgacgacaagaccgtgttcaaccaccagatcgaaagcttcgacccactgatgggcatggcgctgatctgggtcgatgtgcccaaggtcgaaggcggccagcgccaggacctgtggatgtactacggcaaccagaaggcaccggccacggccaatgggcaactgaccttcgacccgaactacaccgcgctgtatcactttgacggggccaatggcacaccagcccgggacaccacggcctacgccaacaccgcattgaacgccaccggcgcgagcatcgacggcgtgatcggccgcgccttgcagttgagcggccaagcgttgatgttgccggccagcccctcgttacagcacgcggcgggcggcgcgttcacgttcagcgcctggttgcgcctggaccaggccagcggcgagcaagcggtgctagcccgtcgcgacggcggccatagtctgttgctgggcctgaaccagggcgtgccgttcgtggaagtcgacggccagcgcgccgtgtccacccaaccgctgaaccccggtcaatggcaacacctggcgttcaccgccgagggcgacaagctcacgctgtatgtgaatggccgcgaaaccgcgaccctggcgcaggccttgccggcgttcaattctcagatcgccatcggcgccgacctgccggaagccggcagcacccacttgccattcgccggggccatcgatgagctgcgcctgtccaaggtggcacgcccggcagcactgttgctggccgatgccagcgcccagggcgccgagtcgaagctggtggcctacggcgtggatgaagaacagtccggctttggcttcggtagcctgggctttttgctcaacgccgtaccggtagatgcctgggtgatcatcctggtgctggtggcgatgatgttccagtcgtgggtcatcatgctgcgcaagaaccgccaggtcagccgcgtgagcagtgccaacgagatcttccgcgagcacttcgcgcagatcggcacccgcctggagatgtacgccgacgacgcacagttgggtgagcgcctggcccattcgtcgctgtggcgcctgtatctggtggcggtcaaggagatccgtacccgccgtgcccagggcgccgacacttcgtcggtgtcagccgccaccatcgaagccatccgttgctccatggacggtgtgcgtacccgcgagaaccaggccctcagctccaaactctcgaccctgtccaacgccatcgccggcggcccgtacatcggcctgctcggtacggtgctggggatcatggtggtgttcctcggcacggcgatggccggtgacgtcaacatcaacgccatcgcccctggcatggcggcggcgctgctggccacggccatgggcctgttcgtggcgatcccggcgctgtttggctacaaccgcctgatcacgcgcaacaaggaagtcagtgcggacatgcgcgtgttcgtcgacgagttcatcacccgcctggcggagatgcacggcgagagccagcacagtgaaaccgcgcaccgccgcgaacatcacgcatcggttccggcctgaggagaatcgccatggcttccgtaaatgcctcccacgacgatgacgatgacgcggccgtcgacagcatcaacatcacgcccctggtggacgtgctcatggtggtgttggtgatgtttatcctaaccgcgaccgcccaggtgtcgggcattcagattcacctgcccaaggccagcgcctcggtgtcgttgtcggaggccaagaccaaggccatttccgtgaatgacggcggccaggtgttcctcgacgcctacccggtgaccctcggcgagctggaagagcgcctgcgcatcgagaaagcgctgaacccggacttcccggtgatcgtgcgcggcgatgcgatggtgcagtaccagaaggtgatcgaagtgctcgacctgctgcgccggctggagctgtcccaggtcgggttggtcaccggcaaaccgagccagggctgagtcatgactgcacagatgccgatcaggccaccgcctgtgaaaaacacgccgccgtggcgcccgttgaagtggggcgccggccttttgctgggcgccgtcgccgcctggttcttgtggcagtgggccaatgacatgagcggcgtgcgccgtgaagcgccgaaggtgccgacgattatcccgttgccgccgccaccaccgccaccgccggaaaagcccaaggagcccgaaccccaggtcgaagaaaaagtcccggaaccggtgccgagccccgaacccgaggaggtcaaaccggccgaggaagcgccgccttcgcctaatgaagacttggccaacccgatgcagatcgatggcgacgcccagtccggcaatgacggtttcaacatcggtgccggcaagggcggcggtatggccggcagcggtggcggcgggttgggcaccggtacttataagcagtacctggccggcacctaccagcgcttgatgcgcgaagacccggagctgcgcaagaaggccttctcgatacagatagacctgtggttgggcgccgatggccaggtcaccaaggcgttggtggccaagtccagcggggatgccgagaccgatgctcagatgctcgccttgatccaggcgccgcgtgccacacagaaaccaccggcgtcgctgacgctacccatgcgcctgtccctcaagggccggcgcccggattgattgaatccttttttcaacggttttttacaggagttgcgtacacatgatctcccccgtgaatcgactgaccctggcggtcggcatggtcatcgcgaccctggtcggccaggcggctgcggccccggtcgcaccctcggaaaacgtcaccatcaacctgatccgcctgctggtgcagcagggcgtgctgacccaggacaccgccaacgggctgatcgcccaggccgaaaaagaagcccagcaggcgcgccaggccgccaatgccgcgccggtagtggccgcaggcccgaccgcagcccccggcgatgtgcgggtgcaatacgtgccgcaggcggtgaaggatcagattcgtgaccaggtcaaggccgaggtcatggccactgccaagcaggaaaactgggcccagcccaatacctttccggactggatctcgcgcatcagctttgacggcgacatccgtctgcgcgacgaatcgcgttacttctcgggcaacaacagcaacaacatcacggacttcgcgaaggtcaatgacaccggcccctatgacgtcaacaagaactccaacaccaagttcccacccttgctcaacacccgccaggaccgtgaaaacctgttccgcctgcgcgcccggctgggcatgaaagcggtgctctcgccggactggaccgccggtatccgcatcgccaccggctctgacaataacccggtgtccaccacccagaccctgggcggcggcttcggcaaaaaagatatctggctggaccagggctacctcacctggaccaccaccgactacatgaagttgaccgccgggcgtatcggcaacccgttctattccactgacatgatgtattccaacgacctcaacttcgacggtgtggccgccatcttcaatcactccctcaacagcgaatggggcgtgttcggcacgctcggcgccttcccgatcgaatacacctccgacaccgccagcgctaacggcatcgacaaggaagacagcgagaccaagtggctgtttggcgggcagattggcgcggactggaagatcaatcgcagcaaccgcctcaagctggccgcggcctattaccagttccaggacatcgaaggcgagcgctccagcccttgcgcgccttgggcgggtgcggcgggttgcgacacggacggcacgcgggtggcgttcatgcaaaaaggcaactcggtgttcaacctgcgcaacaacaccaccaacccggccgacccggcgaaaacgccggaccctcaattcgtcggcctggcgtccaagttcaatgtgctggacctcaacctggtctgggacagcgagttgccgagcgacttcaagttgcgctcccaggccaacttcatccacaacctggcctacgacaagggcgagatgctcaagcgcagcgaaggcgagatcgtcaacaacatcaacggcaagggccagtttgaaagtggcggcaatgcgctgatggtctcgttcaccctcggcagcgcgctggagatgcgcaagcgcggcgactggaacgtgctggccggctacaagtacatccagcccgacgccttgcccgacggcttcaacgattcctcgttccacctgggcggcaccaacgccaagggctacttcatcggcgccaactacggcatcgaaaagaacatctacgccagtgcgcgttggttgagcgcgtccgaagtctacggccagccgttcgaagtcgatgtgatgcaactggaactcaacacgcgcttttgatgcgcagggagatgccacatgaacacgcgaatctgcgggttgttactgctgctggtcgccactggcgcgtcggctgaaggcatggaggagcgcctgcgcacgcaactgcgcagcaccacccagcaattgcaggccctgcaaagcgagcaggcccaggccagcgccgcgcgcctggctgcggaaaaccaggccaagcaggcccaggcgcaaatcaagcaactgacggccgagctggacaaggcccgtggcgtggccgagcaaatggccggccagcaacagagcctgcacagccaggcgcaggcccaggtggctgccagcaacgagcagatcggcaagttcaagaaggcctatgacgaactgctggtgctggccaagggcaaagaggccgagcgggcgcgcttgcaggcccaactgagcgaacgtgacacacaagtgcagcaatgttcagtcaagaatcaacagatgtacggcgtagcccagcagttgctcgcggcctacgaaaaaattgacgtggccgaggtgatgagcatccgccagccgttcgccagcagcgcccgggtcaagttcgaggagctggcccaaggctttggcgacgatttgtacaagagccgtttcgatgcgccccaggcaactgccaatcattgatagacagggaagagatctccatgagcgaattgatcaccagcgtcaccacccagagcctcaccgagttgctgcaggaagccggttaccgggtcaaccagactgagcaaaacggcatcgtgcaattgctcagcgccagccagggcatcggctttgcggtgcgtttcggcaacccggcggcagagcagggcgcctatgtggatttcacttacagctgcgcgctgcggatccagggcgaattgcccgaaggtctggcccaggtatggaacgcctcacgccgttttgcacggttgtcggtgcagggtgaattcctgctgatggaaatggacgtggtggtggccggtgtcggcgctacgcacctgcgcagccagttggagttgtgggaccgtctgttgcaggaatttatcgtctacctgcgtgagtacagccaacaggccgcgcagttgcaggcggaagccgaggcgccggtactgtgaaaaagccaaccctgatggtcggagcgggcgcgctggccttgctggtggtggcggtgggcttgagcctgcgaccgggcagcgacccggtggcggcacagcaaccggcgccggtgacccaccctgtaccggtcggaccggcggtggcccgcttgggtaaccagcagatcgacctgacggaactgaaaaccgtgctggccagcctgcctgccgaatcccgcgagcaattgcgtggcaaccgtggcgcgttggaaacctggattcgctcacgtctggcgcaaaaggccgtgctcgaacaggccgacgcccagggctggcgtcagcgcccggacgtggagcagcaaacccgcgccgccgccgagcagattgtatttcgcgattacatgttgtcggtcagccaggtgccggccgattaccccagcgccgccgaattgcagcaggcctacgacagcggcaagtcgcagtgggtgacaccgccgttgtaccgagtgagccagattttcctcgcggtgaatgacccgcaagccgtcgacagtgtacgccgccaggcccaggagctgagccgtcgcgcccaggccgcaccgaatgatttcgccgccctggctacgcagttttcccaggacaccgactccgccgcacgcggcggtgactcgggcatgcagccgttgcagcaactggtgccggaagtgcgcagtgcggtgtcgcgcctcaaggtcggtgccgtgtcggacgtggtgcagagtgcagcggggttccatgtgctcaaactcaccggccagcaaccggcgcgcaccgcgaccctcgacgaactgcgtgaacgcctcacccaggccctgcgtgcccagcgccaggaacagatcgccaaggcttacctcgaaggcatgctcaataccgccaccctgagtatcgacggcgccgagctgaacaaagtgctggagtaacacgcgtcaacccgcattggatgcacagaccaacaagacagggagtctcccatggcatttctagaaccgtctgccccccaggggccctccgtttatcgcgtgtcaaccgagggccgcagcagttggctgaccctggcccatgagatcgacccggaagtggcgcgctacttcctggtgagtgcgcgctgcggttgtttcatgcaggcggcgcgcagtttgaatatcaaggcgacgctgttgcgcaagcgtctggcgcagttggaggaacacctgcggcattcgctgttcagctaccagggcaacggtttggtgctcagtcgcgatggccagcagttgcaagcgcagctgattgcactggcccatgaacgacgcttgccggtgacggagcagccgttgattcggctcgcggtggctgagccgatcctgcatgacatccttgggcgtgacttgatcgccttgctgcgccgcaatgccagcgtgcgcctggagatcatctccatcgacagccagttgtcgttgcaggcggtggatgtggacgtggtgctgtggctgtcggacgccgacgggccggtgcccggtccgagctttgccactgaaccgcctagggccctggcgcgtttgcagtatctgccgcatatcgccaagcgttattcgcggttgaccacacggccggacagtgtggaggacctcgacgattacatgctggtgcaatggcagccggatgcgcaggtgggggctttgcaggcgtggaaccaggtggtgcagcagcgcctggcggcagtggtgcaggtgcatgcgtattcgctgatgctggagatgatccgttgtggcgcgtgcattgggttgctgccgcattacatgagcagtttcgaccgggggctggtggcgttgccggggttgctggatgagcgtatgcagcgccaggtgtggttggcggtgaatgcgcaggtgcggaatgaggaggcggtgcggatgattgtggaactgatcgtcggaacgtttgagggacggcgggagtggtttgattgatagatttatcctcggccagcaaatccccctgtggcgagcgggcttgccccgcgttgggctgcgtagcagccccagtgaaggcaccgaggtattcctgaaagaactcagcgtcgagttttggggctgctgcgcagcccagcgcggggcaagcccgctcgccacaaagaacagttgtcaccgatgcaccgcggcgtgcgtatcgcaggcaagctctcacaagaaaagcagactgacggtcgccggcgttgcgcggctgggataagtgcgccagtcttggtggcctcattccctgggtctaagcacgctgcgatgcaagccacacgcctgacactcatttgccatgccctcacgcccctgcaaaaacaggggcgtttctgcgatgacgagccggtggcgatcgattggcagggcgcggccggctccctcgccgggcgttacaggaaaacgccgcgtttactctgcgctcctgagctgcgtactcggcagacggctggcttgttcggcaatgacgctgtgatcgaagacgccctgcgcgacgccgacttcggccagtggaaaggccagcccatcagccaactcaatagtgatgagttgaatacctggctcaccgacagcaccttcgcgcccccgggtggggagtcagtcgatgacgtgtgtgcacgcgtagcgcagtggctgaaaaccctcgaatcccaacccggccatattgtcgccatcacccacccctttgtgatccgcgccgcgctgttgcaggtgatgcagtttccgctgtcgatgttctaccgcatcgacgtcgaaccgttggccgccaccgaactgcgcttcaacaccgtctggcgcctgcgcctggaaactcacgcctgagcgcctgaacatggcagaatccacgccccgcactgagagcaacccatgaaacgcatcctgatcatcggcattggcgccggcaaccctgactacatcacgatgcaggccgtgaaggcgctcaaccgtaccgacgtgtttttcctgatggacaagggccagagcaaagacaagttgatcgacctgcgccgcgagatctgcgagacctacatcactgagccgggctatcgcttcgtggaggccgagtgccccgagcgtgtgcgcggcgatatcgactacaccaccgccgtgcgggacctgaaccgcgacaagcagcagaccttcgagcgcatgatcaacgaagaaatggctgacggtgaagtaggtgctttcctggcgtggggcgacccggcgttgtacgacagcaccatccgcattttgcaagcgattctggccagtggccgctgcaccttcgagttcgaggtaatccccggtatcaccagcgtgcaggccctggctgcacagcacaaagtggcgctgaaccgcatcggcaagtcggtcgagatcaccaccgggcgccgtctggcggcggggcaggcgagcgatgccgacaccctggtggtgatgctcgacgcggaagactcctaccgcaccgtggccgatcagggcctggacatctactggggcgcctacctgggcacgccggatgagatccttatcagaggcaaggtcagtgaagtggcagaagaaatcgaacgggtgcgcaaggcggcgcgtctggagaatggctggatcatggacacttatctgctgcgtaaaccctgaggtcacgtcccatgctcaaactgtttgccctggcactgaccctggtggttggcgtcgctcatgccgacgatacactgcacactgacttgccgttgtcgtacctggaacagacccagggcgatgcgcgcaaccagccgctggtgattttcctgcacggtttcggcagtgacgaagaggatttgttcggcatcaaggacgcgctgccgtcgacctggacttacctgtcggcccgcgcgccgatgccggtggacccgcatggctatcgctggtttgccaggaagcccggtgatggcgattacgatggcgagactgccgacctgcaacgcagcgcccggttgatcgaagagtttgtcggtaaagccaccgccaagtaccacacccagccggatcgggtgttcctggtgggcttcagtcagggcgcgatcatggcctacgaggtcgggttgcgccgcccggatctgctgcgtgggattgcggccttgagtggcagcgtgctgccggtactcaaggctgagctgaagccggatgtgtcactgggcaaactggcgattttcattggccacggcaccttggaccaggcgctgccttatgcctcggccactcgggcgaatgaggtgttgacgggactggggttgaagccggagttccacgggtatccgggcatgccgcataccatcagtgaaacggaagtgcaggacctgaaagcctggctggaaaagagcctgaattaaacgcggtcaaacattgtgggagggggtttgttccctcccacacttggatcgggttgtctggaagactgttatttcccgccggtaatctgcttcaccagcgccgcgtgccccttcgcatcatccgcgcgcgagattgcctggatcaccagcaggtgattgcccgaaccgcctaggaacgtggagttcagcgtcttgccgccgccctgggtggcggtgctgtccacttggcgcaggcccaggcccttgaaggtcagcttcttctcgctctgtttcttgaagtccggcagggcggcgctctggtccttgacgaagccggccacggcaccatccaggaatttggtgtcgttatccccaatggtcagcccatcgttgcgcacggtttcggcgacgatgactacacttttcgtggtctggttggcgtacatcgtgccttgggtgtcggcagtgccatcctcggccttgccggccggcagggtgtcggcggcgtaggccttgggcaagttaaaggtgaacttgccgcccaaggtggagatggtttgggtggtcggcttggacgcggcgaacacgctgccggcggtcagcgcgagggccagcaggacggcggtcttggtgaaagtggccatgaagcgctccagggatgaacgagattgcggcgtattctgtcagaaaaatcgcaatctcgttcactggcagcctcacaccttgtcggactcttcctccagccgatccatctcaaacagccgcgccagttctgcccgtgcttcctgggcggtttgcatcaccttggccgcgtcgtcgtacaccgcgtgttgcgcggccagcacttgcaggtcgtggttcttgaagcgggtgatgcgcgcgtcggcctgggcctggctcaagccgaggcccaccagggtacggcggctcatttccaggctggaatagaaggtctcgcgcaccggcgaggcgtccaggtcgaccaagcggtgcacgtgctggcggttacgcgcgcgggcgatgatctgcatgtgcgggtagaggttgcgcaccagttcggcggtcttgatgttgatttccgggtcgtccatggcgatcacgaagaattccgcctggtcgaccttggccgcgtgcaggatctcggggcgttgcgggtcgccgtagaacaccggcatgccgccgaagctgcgggtcagctcgatggtttccaccgaggtgtccagggcgatgaacgagatgttctgtgcacgcaggattcgcgccacgatctggcccatacggcccatgccggcgatcaccacgcgtggcgcatcgctttcgatggtgcggtattcctcgggcacttccaccggcttgaccttgggcttgaacagcttcgggcacaccagcagcaatagcggcgtcaccgccatggacagggtgatggtcagcaccagtatgtcgtagaggtgcggttcgaacaggccctggtcgcggccgatcttgaacaccacgaaggcaaactcaccgccggccgccagcaccacgcccaggcgcagggcgctttcgcgattgaggtcacccaccatgcggcccacggcatacagcagcggcaatttcaggcctatcaacagcagcgtcaggccaatcaccaccagcggcgagctgagcaacaggctgaggttggcgcccatgcccacgctgatgaagaacaaccccagcagcaggcccttgaacggctcgatctgggattccagttcgtggcggtactccgagtctgccagcagcaggccggcgaggaaggcgccgagagccatggacacgcccaccaattccatcaaccacgccgtgccaatcactaccagcagcgcagtggcagtggacacttcacgcagcccggtcttggccacgatgcgaaacaccggccgcaacagatagcgtccgccgatgatcaccacggcgatgctgccgaggatctgcaacacatgctgcaggccctgggcttcggtggtcgggtgatcgctgccggccagcagcggcaccatggcgatcagcgggatcgcggcgatgtcctggaacagcaggatggcaaaggccaggcgcccgtggggctggttcagctccttgcgctcggccaggctttgcaggccgaaggcggtggacgacagcgccagacccaggcccagcacgatggcgctgttccacgactggccaaacagccacaacgccaccacgcccatcaccaggccggtcagcagcacctgcgccaggccgacgccgaacaccgccttgcgcatcacccatagacgcttgggtgacagttccaggccgatgatgaacagcagcaacaccacccccagctcggagaactgcgcgacgctttgcgggttgccgatcaggcccagcaccgacgggccgatgattacaccggcaaacagatagcccagcaccgcgcccagttgcaggcgtttggccagcggcacggtcagcacggcggcgagcaggaacaccacggctgcttgtaacaggttgccttcatggggcattgcgaactccaggatctttaaaaccaatcaacaggcgggtattagagcgctttttacatttcgataattgtgtttttgcggcgtaggagggggatagcgcagtgtttttcaagggcgcgagctttctgccggtgcagtggaaggatgtacaaacaatttcccaagcgccgcaggtggaaggccgggcacttcgcctcctaatttttatgctcttgagtttatattccatgggtggcatatttcatgagctgggacgttgaatacacggatgaattcggagactggtgggaggatttgggagcaaaggaacaagtttccgtatccgctagcgttgatctgctggtgcttttaggtccgggcctgggctttccccacagcagcgctatcaagggctcccggcatggcaacctgcgggaactgcgcatacaacacgccggtcggccgtttcgtgtgttgtatgcctttgatccacgccgatgtgcgttgttgctgatcggtggagacaagacaggacaacatcggtggtatgaggaacacgtcccgatggcagaaaagctatatgacgtgcatttggaaacaatgcgtaaagagggccgtaaccatggctaagaaattcgctgagcttcaagcgggcatgacgtcacaagcccgcgccgaagccaagcagttgttccagcaacacatgcaggaaatgccgctgcatgagctgcgcaaagcccagcagttgagccagcagagcctggcgaaggcgttgaatatcaaccaggcggccgtctccaagatggagcgccgcacagacatgtacatcagcacgttgcgtgactacatccgtgcgatggggggcgaactggaaatcatcgcaaccttccccgatggccaggtcaagatcgataatttcacttattgaaagcattgcaaacgcccggcgcgtgccgggctttgttttatccggctatttatcgctttgcatgaccgcaccttgcccgaccggtgcgaggttcaccggccggcgatacaagcccaccgccagcccggcgatgatgatcccgatcgagatcaggttcggcgtggaaatacgctcatccaggatcagcatcgaactggtaatgccgaacaccggaatcagcaacgacagcggcgccacggtggacaccgggtacaacttgagcagcgagttccagccccagtaggcgaagtgcgtggccaggtacacctggaacagtatcgacaggatcgccgtcaggtcgagactgctttgcaaaccttcgaacgcggcgctgccgtgcagcagccaggcggtgaggaacagcgggatcggcgggatcaggctggcccagaccatgaacgagaagatctccttgacccctgatttcttgatgatcacgttgcctacgctccaggccaccgcactgaggacgatcagcatgacgcccagcaccgcgtggttgccttcctgggtggagatgatcccggccaggccgatcaaagccagcacggcgccgatcatctgcgcgccacggattttctctttgaacagcacaaagccccagcccatggtgaagaacacgctgagttgaatgatcagcgaagcaatacccgggctcacgcccacctggatgccgtagttgatcacgccccacatgcccagcccgaagataaaaccgtaggcggccacgtagctgaacttgacggccgggcgcttgataaagaacaccagtggcaaggcggccagggcgaaacggattcccgtgagcacaaatgggtcgatggcacgcaggcccagcttggtgatggggaagttgaccccccagaccagggtgacgagcacggcgagtgacaaatgttttttcagcatggaccctccttgggtcaggcggcacagcgcagttgcaatgtgccgccgggaagtcagttcaaggcgaaccgtttttgcgtcaggcgcagcccggcatttccggataccccttcgaacgaaccaaacttgggcagaggcgattttaggtggcagatgattggcccgcttgctatgtcaggtcatactttgacaaaatcgggccatgtcgccgaccttcaccttatccccttacgaactcgatagccctgctgcggtggtgacgctgcgcgagtacccgtccggcacggtgttcccacgccacacccaccggcgcgggcagttcgcctacgcatccaccggcgcgttgaagatgttcacggagctgggcaattgggtggtgccgccgcagcgggcgatctgggtaccgggcggggtggcgcacgagatgcacatgcgcggcgatgtggtgatgctcaatacctacctggacgatgacgcggcccgacgtgcagggttgcaggaccattgccaggtgtttgctgtatcgccgttattgcgccacctgttggaagcggcgctggcgattgggccatcggcttcgcccagcgtccgtgattgctgcgtgctgaccctgttgatcgacgaaatcggtgccatgcccgagttgccactcagtgcgccgttgccgtccgaggcgcgcctggcccgttcgtgtcaacgcttcctggaggcgcccacgcagaacatttccatcggtgagatggccgactggtcgggcatgagtcggcgtacctttacccgtcacttccgcgagtgcacgggcatgacctttgtttcgtggcgccagcaggtatgcctgctggaggccacggcacggctcagtcatggctcgtccatcaccgatgtggcattcgaattggggttcagcagttccagcgcgtttacgtcggtgttccggcgtaacctgggcgactcaccggcgcgctacctggccaagtccaaggcagcttccctgttctgaacggaggaggcggcgaccctggtgcctttttcccagcggtacggcgttgagcctcgccctttgttactatcgccgtcccttgtcgccaggagtcacggccccatgcagcaccagtgggatgaaatgcaccgcacccgcaagcccacgttcgtactgtgcggcgagcctcagggcgacgtgctcaatctctatgttcacggttattcggcgttcttcaaccggcaacaactgggcaacttcaaggcgcagttggcgagtatcgaaggttcgaccaacctgatgctgttctggccggcggggcatttcctggaaaacctgtttgcgcctttcaaggaggtgatcggcgcgatgctgggcggcggtagcctgggcgcggcaaccgtcggggtgggcaaggcgcttgcctattttcttgatcactacaaaagcgtcgaggcgcgggtggacgaagtcgccaaaagcctgctgccggaactggccaattacctgcacggtgaatcccttgatgtgcggcgtatcaacctgatcgggcattccctgggcgcgcggatcctggtcaagagcctgctcgccagccccgaaaccgcgcgggagctacccttggacaacctgctgttgatgggcggcgcgatctgtacgtcgagcccttgggatgtcgtgtcggcgccgctcaaggggcgggtaatcaactgtcactccagcaaggactgggccttggccataaagccggacaccgaacgctgcatcggtcgttatgcgatcccggtgacgccggccctcaaggccaaggtcaccaacgtgcacctggcgactttcgatcacgccgcctattggccgcaattgcagacggtggtgcagtacaccgacctgctgcatgaacggcgtggcatgatccgctccgaccagcgcagtgctgaagtgcgttttgccgaggaggacatcgatttgttccctgcgctgatgcaggcccggccggaagaggtgaagttcctcgccgaattgatggcgcaaaaacgcagtgcatcgatagacgccacggtgcgcgagccgctcaagttggctattgagctgcaacgcatgggcggcgataccttcatgaacctggcccgtggacatggcgtgggttatcgccagatcgccgaagatgtggtgcagcggctggggatcaagttcgacgagccgctggatacggtcgcactggccgatctcgaagcccgggtcgccgagaaactcatcgaacagtacaaggacaaactcagcaacacggaccgacaggtgttcgacgcagaactcaaagcggccgctcaaaaggagcagggcttgttcagccgttttgacgtaggccggtcggccaccaccgcgttgagcggcacggcgttggccgggctcaccggttttatcctgcgccgtggcgcggctacggcaatcccggtggtgggccaggcgttggcggcggcgatgctggtggtgagcggcgtgcgtgcattttccggcccggcgtattcgatcaccacgttggccgtgctggtgatcggcgtgattcgccagcgcatggagcgtgaagcgctgaaccaggagatggacctggtggtgcaggtggtggaggcgttcgacctgccacgggacacggtgatgcgcacggtcgtgtctgactgataagctgcacccttgtcttgtgtgtgcctgggataccgcgtgaaattcagcctgccgaaaattgctaccgccccgttctgcccgccggaagtggccggctccgtcgccgtggaccccaaggcttcgttcttcaagcgcatgttgatgttcgccggccctggcctgctggtctccatcggctatatggacccgggcaattgggctacggccatcgaggccggttcgcgctatggctacagcctgttgtttgtggtgttgctggccagccttgccgggatggcggtgcagtgcctgtgctcgcggctgggcatcgccaccggcaaagacctggcgcagctgtgccgagagcgttacagcacgcgttctgcacgcacccagtgggtgttggcggaaatctccatcatcgccaccgaccttgccgaagtgctgggctgtgccctggcatttcatttgctgttgggggtatcgctgaccactggcattgtgatcaccgcctttgacacgctgttggtcctggccctgcagaatcgtggtttccggcgcctggaagcgatcatgctggcgctggtggcgaccatcggcgtgtgtttcttcatcgagctggtgctgatcaaaccttattggcccgacgtgttcagtggtttcactccgtcactttccgcgatcagcgacgccgcgccgctttacctggccatcggtatcctcggggccacggtgatgccccataacctctacttgcacagctccatcgtgcaaacccgtctgatcggcaaggacctcgccagcaaactggacgcggtcaagctggcgcgcatcgacaccatcggttcattggccctggcgctgctggtcaacgcggcgatcctgattctcgccgccgctgctttccacaagaccggccatactgaggtggtcgagatccaggacgcctaccatctgcttgacccgctggtgggcggtgccttcgccagcatcctgttcggcattgcgctgttggcctccgggcaaagctccacctttaccggcaccatcgccgggcaggtgatcatggagggctacctcaacctgcgtattccctgctggcaacgccgcctgatcacgcgtgggctggcgctgattccggcgtttctgggggtgtggctgatgggcgacgatgccatcggcaagctgctgatcctcagccaggtggtgctcagcctgcagttgccgtttgcgctgtatccgttgatccgcatgaccggcgataaacagctgatggggccattcgtgaatcggctgccgacgcgcttgttggcgtggtttctgtttgcgctgatcagtggggcgaatgcctggttgattgggcagtgggtgttcgcttgaggcggtacagcgttctagatgagttagaccagaatcgccaaggacgtgtattgggcgatgtgtggatcggccgtcaatagcctcatgggttcgcttatggctgtcgcaataatgagccgatcaaaagggtccttgtgatgctgctcgagatccttgactgcgatggcatgttccgaggtgacgggcagttcggcaaatccgctttccaggcagtactcacggatttcctccaagtctacggtgagtttccccaggccgaccttgattgccatttcccagaatgtcgcagcgctgatgtaaacctccgctgcattctctatcagcttcctggctttgctggatagcctggggtcttccgtcagggtccagagcaggatgtgggtgtctaacagcactctcacggatgcttgccttcgaaggcatccagcagggcgccaggcaggggtgcgtcgaagtcttcgggaatgacgaacttgcctttcatggcaccgattctccggcttttgcatttccccacgggcacaagttgtgccatcgcacgtccatgcttggcaatggtgatgaccttgccagcagcggcctcatccaccagttttgacagattgtttttcgcttcgcccaaaggaaccgtgatcatgtggttatccccatattttggccaaatatagccaaaactgggtgcgctatcaaagacggccagaccgctggcggacgcggcgcgctcagatcgcgatggtttgtgatacgtgactttcatggcagttctctaaaagaggatgttgcgcaagtctgccgtaataggcttggccacaagaatactggcccgaaaaaacagaatggaactacttcctgctgtaggaaaactcccgaaccacttggttcaccgatcccaatacggcacggccccaaaacactccacaaaataatcaatcaccgtccgcaccttcagcgacaggcgccggctgcctggccacagtgccgcaatctgctgcggctccagggttgtcgccacttcatagtcggtcagcaccgcctgcaacgtgcctgcgcgcaagccttcgccgatcaaccaggagggaaacaccaccagccccaggccttgctcggcggcatgggtcaaggtgtcggcatggttgccggtgatcggacccttgacgctgtagggcgtccagtcgccctggcccttgcggaaaaaccagcgttgctggccggtgatgcctttgtaggccaggcattggtggtcgatcagttcgtcgggatgttgcggcgtgccatgccgggccaggtaggcggggctggcggcgatgcgaaagcgttggggcgcgaagatgcgagcctgcatgctggaatcgttgagcacgccgatgcggaacagcaggtcagtgccgtcctgcagtggatcgacgtacgtgtcggtctgctggatgtccagttgcagcttcggataccgtcggcacaactcacccagccacggcgacaggtggcgctggccgaacaccatgggggcattgatgcgcaccaggccgctgggttcgctttcctgttcctgcaatgcctggctggcggcttcgagttgttccagcatcaaccgcgcatgccgccccagcagacgaccggcttcggtggggctgaccgcgcgggtgtgacggtagagcaactgttggccgagggcctgttccatcagctgtatttgtcgggagatggaggagggcgccaggccttcgcggcgggccacttcggagaagctgcccaggtccagcacggccacgaacaggcgcagtgccttgaaactcaattcattcaagccttgcatcatgcctccaggctgtgcgtttttcgcaaaggtgttgtcagcatgctcccatttatcgcacaggacggccaccggataatgcgcgccatgtttcctttcttgaagtgcaggtgttgtatgcaggcaagttctatcgagggtgtggcgcaagccaaaccgaaaaaaaatggcttgaggttgctgttgttgccgctggtgatcctggccggcatgggcctgtcggtagaggccggtttgctcggcccgctaggtgtgcaggtggggcatttgtgggcgaccctgagcattttcggggtgggctcggcgatcctgtatctgctgctgttgttcagtggccagcaaaagggcccggcgctctccgaactgccgcgctggcagttgatcggcgggttcctggggccgatctatgtggtggtgctcaccctggccacgccacatatcggtattgcgatgaccatgatcgcgattttgtccgggcaagtcggcaagagtgtgctgatcgaccatttcggctggttcggcgcggcgcgcaagcgggtcaatggcgaacgctggattgccctggcgttgattgtggtggcacttgttctgattgcacgaggttaaggcgatgaatctgattctgttactggtcgtggtggttgccgcaggtgcggtgttgagcgtgcaggcggcgatcaacggtcgcctgggccaggcggttggggtattgcgtggcagcctggtgaccttctcggtgggggcgattgtcaccgcgttaatgattttcttctttgaacccgtccagacggtgagcctgctggacgtgccgaaatggcaactgaccggtgcgttgttcggtgtggtgtacatgatggtgatggtcggcgcggtgccggtggtcgggacggccgtcgccaccgtcgcggtgatcgtcgggcaattgggcatgggcatgctgatcgacaacttcggctggctgggcaacccggccatcgagctgtcgagcagccgcatcgtggcgatggcctgcctggcgttggcgctggtgttcatgtaccgcagcaatacccgcaccgactgaggggttgaaccatcgacggcgggccgcagtcactgcttaaggtgccggcgcccgccgcaccgagacgaccatgaagaaggagtctgaccatgccagataaaacctgtgcctgcccacactgcaaatgcgtgctgggacctgatgcggtcatgaaggacggcaagggctattgctgtcagggctgtgccgagcaccatgcccatggtgagccgtgtgcggctgcgacggggtgtgagtgtgccaagtctgccagaggctagcggtgtttgaaccggtgggagcctgcgtgctcccacacggtttaccggccgcaaaaatcactcggattgtcgtgccgcggtgattaccatagcgactctccctcgaatgatgtgcaccccatggccctggccgcgccgcctgacctcagtgatcctgccgttcccgtgcaacccctggcgcgcacctatccgcgcgggctctacgttgagccccacagccacgactggggccagttgctctatgccatgagcggcgtgatgtgggtcgagaccccgcaggaagcgctggtggtgccgccacagcgtgccgtgtggctgccgcccggcgtagagcatggtatccgcgtggtctcggacttgcagatgcgcaatatctacctgcgcccggccctggccgcaacgctggacagccaggtgcaggtgatcgaagtcggtgggttgttgcgcgagttgatcgtcacgttggtggacgagggcgacaacggtgaggtggcgtactacgacgcgctggtcagcctggccttgctggagctgcaacgggcgcgccgctcgccgattcgcatcgccatgccggtggaggccgaccgccggctgatcaacgcctgccaggcggtcatggctgcgccgtcactggagatccctttcgagcagcatgccgaaaccgccggtgccagcgtgcgcaccctggcgcggttgttccagaaccacctgggcatgggttttgccgaatggcgccgccaggtgcaactggccacggcggtggcggagttgatccagggccagtcggtcagcgccatcgcgcgttccctggggtattcgcccagcagtttcagcgacatgttccggcgtgaactcggtgtggcgccatcgcaatacctgggctgaggggttggccgatagcctgaagcacttggccgatgcttcaggcatgcgctctctacactgagcgcatccacccacaaggcgctgccccatgaactacctcatttcccttgccatcggcctgtttgtcggcgtgatctacggcgcactcgacttccgctcgcccgcgccgccggccatcgccctggttggtctgatgggcatgttactgggcgaaaagctctggcccatggggcggcaactggtgggcacctggttctcctgatctctttttatttgatggatattggccatgaaagcactgcaatttactgccaccggcgacctcaacaccctgcgctttgtcgacgtcgccaccccggtgccggccgtgggggaagtgctggtacagatcaaggccgcgggcctcaaccccagcgacgtcaaaaacgtgctcggtcgtttcccctacaccaccttgccgcgcatccccggccgtgatttcgccggggttgtggttgaaggttcgcaggcgctggtgggccaggaagtctggggcaccggccgtgacttgggcttttttgccgacggttcccatgcccagtacctcaccgtgtcggccaagggcgtggcacataagcctacccacctgagtttcgcccaggccgcgagccttggcgtgccgtacaccaccgcctgggatgcactggagcgcagcggcgtgacccacggcacacgcctgctggtgatcggtgccaatggcgcggtgggcagcgcggccctggccctggcaaaaatccgtggtgcccaggtgctggccgccgtgcgtcgcccggaacaggtcgacgtcttgcagggccagggcttcgacgcgattgccctgggcaagccggaagagctgggcacgcaggtcaacgccgtgttcaagggcggtgcggatgtgatcttcgacaccaccggcttctggctgccggccgccgtggcaggcctggcgcccttcggccgcatcgccattatcgccgcgccggtggacggccatgtacaactgccggccctggcgttgtaccgcaagggtggttcggtggtggggatcaattcgttgctctacaactgcgagcagtgcgccgtgatgctggagcagttcgggcggttctttgacgaaggcttgttgccgttgcccaccggcctgcgtgaagtggcgctggccgatgggctgcagtgcttcgaagaggtgaaccagggcagcgcagacaagatcatcttcctgccttgatcctggcggtcatgcctcgggaacgcctttctcccaggctgaccagttcttgaggattgcctgtaccaatgggttgcccgtgcggtacaggttctccagcgccgggacaaaaccgccctggtccgcgtacttcaacaggttatccacttcgctgtagcccgggtacggccggtcgaaatccgaaccggcgcgcaccaccgccaggcgctggatgtccaccaagccttcgcggctggcgcgcaacagggcctcataggtggagttgtcttcctgctgggtggtgcagtactcgcctttgttgtcggtcagcagcttggtccacacctcggcgcgctcgctcaagcgtgtgccggaaaaccaggtgttgcccgccagggtgtcgcagcgggtgacttgcggcggctggttggccggcgcggcggggtagtgtttgcgccaggcgctggattccttgctttccgtcagctcgactttctgcgacagggcaaacgccttggcctgcaacttggggttcagctcaaacacttcggtcttgtagtccagcggtggtttttcgttggggcccttggtgttgatgcccagatagccggtcggccaatccttcggcgcatcccgcgaatccagctcccactgggtgccgaattccaccaggtaatgtgcccacgcggcggtgccgatcgtgccgtgcttggggctgataccggcgatcccggcgatcaggaagtagctctggcgcaggtcgaacttgggcgacagcgccaaggccagggtggaggccgcggcgttggtctggcccatgccggtgaccagcaggcaaacatcctgggtattgcagcggatcaccggatactcggcagacaagcccggtacgcgcacttcctgcttgagttccaggcggtcgatccaggtttgcgcctcgggggcgaacatggtgatcagcatcaccttgggcttgatcggtgcgggtgcgtcggccagcaccacttgaggcagaacggccaggccaacagccattgaaagacgggtaaacgcgttcatctaaagctccttgatcagaattgatagcccacgccggcgtagtaaccccagccgtccgagcgggcgcggaaattaccttcaccgaaattcaactcgctgccgtcttcccagttgccgccgttatgaaagtaacggccgaccagggtgaaacgcaggtgggtgaacgaatacagcagcacgttggtggccaccagggaattggccgtgcgtgccgggttgtccttgtgcaggtccgagccaaaatcgtagttggtaaagccgatgtaggtcagcgaagcgccgttatcgaatttgccgatgggcacgatgtacttcatttgcgcacggtagccgtcccaggaatattcgttgctggcgccatagttttcccactggtaacgcccgtagaagttggccgacaggttgacccgcgagtgggtgtcgatatcggtgcccaggccgctgtacagcgtatttgcgcggttggccttgttgctgccgtggtcgtagatccagtcgaaggccacataccattccttgaacggcccgatggccaggctgcggcccgccaggtagtcgatggaaatacgcggctcatgttccatgaacaccggcgagccatggtcccacacgcccttgtcattactgttaccgatggtgaggatcttcggcacgtcgatatagccgtacagctcgaaaggccccttgcggccgaagtactcgtactccagatagacgtcatcctgcggcttggggccgaagctgatgtctttgctgccgatcaacgtcaggtcctgattgaaccagtccgacaggtacacaccttttttcgccgggctggcttcagggctgagggtttcgccctgtgctgagtcatcgatgggtttttcctgcgccaaaaggggcgcgctgagtagtcctgtaacggcagccagtagcaaggaaacaccaaaggaggtaggacgccttgaggtgaagtgcattgaaaatccctattcgtacgcggtttgaacccgattcttcgggtggaggtgaacttggttgccaagttcgtaccgcaaacgtttgcacaggctgtaccaactttgctcaatcgattgatcagcttggaaaaaaactaaattagtcgaccttttggtcaaaattgactgggtgtcatttttcaaggcgttggaacaggtgcatcgcggtttcccgccgatagtcactcggcgtttggttcatctcgatgcgaaagtgccggttgaaattggacaggttggcgtagcccacttcaaagcagatgtctgccaccgacatatcgctttgcagcaacaaccggcaggcgcgctgcacccggaacttgcgcatcaggtcgataaaaccgtggccggtgttgcgcttgaagaagcgcgaaaagcccggttcgctcatctccaactgttgcgcgatcaccgacaggcgcacatcgccggtcagctcgcgcatcaaatagtcgaatgccttgttgatgcgttccgcgctgcgcgcatccagggtcggcgcgtagcaggggctggccagggccttgacctgttggggcggggcgtttttcagggtgtcgagcaattgcaggaacaggatcaagcgttgcaggccctgggcgttaccgatggcttccatccaatgcgcggcctgcagcgccgtgtcgccggtgaactccagtccacggcgggcctgttcgaacaacggctgcaggtcgccgagctccggcagggttctgcgcaaggcgaggagggcggcgccgtcgaattgcagcaccacgtcgcggccggtgaggtattcgccgggggccagttcgccgatccagtcgtggggcaggtcggggccgatcagtgcgacatgcccggcgctgaaggcaccgatgtagtcgccggccaccagtttgccgctgccttggcggatcaagtggatttcgaattcggggtggtggttccagcgggccaggtcgtagggatagtcatgttcgaaccagcggaagcagtggtccggctcgggcaggatcacttccagttcggcggggcggtgctcgaacagcgtggcacggctgatgggcatgagcgggcttcttggggttcttgtaatcgcttcaaaatacgcgcctcgggcgttcaggcgctacccccgcttgcgtccggcactgatacttttttaactcgcgcgtccccggttaaaaaagtaccagtcgagcatccgtcacgggtttgtgagtgcctggccaagctgctgtaatcggcgctcaacaacaaaaacaacaggtggaaaccgccatgttcaagctcccgcaagcgttgttcctgctgtccggcctggcgttggccatgcccagccacgccgccgacaccgtcaccatcgccacggtcaacaacagcgacatgatccgcatgcagcgcctgtccaaggtgttcgaagcccagcacccggacatcaagctcaactgggtggtgctggaagaaaacgtgctgcgccagcgcctcaccaccgacatcgccacccagggcgggcaattcgatgtgctgaccatcggcacctacgaaaccccgctctggggcgccaagcactggctggaacccttgacccagctgccggccgattacgatgccgacgatatcttcccctcggtgcgccagggcctgtcggtcaacgacaccctctatgccttgccgttctatggtgaaagtaccgtgacctactaccgtaccgacctgttccagcaggcgggcctgagcatgccggcgcacccgacctggacccagctcggcgagttcgcgtccaaactcaccgccaaggacaagggccaatacggcatgtgcctgcgcggcaaggccggctggggtgagaacatcgccttgctcagcaccatggccaacgcttttggcgcgcgctggttcgacgagcagtggaaacccgagctgaccagccccgagtggaccgcagccgccaacttctacgtcaacaccctcaagcagtacgggccgccgggcgtgtccagcaacggcttcaacgaaaccctggcgctgttcaacagcggcaagtgtgcgatctgggtcgatgccagcgtggctggctccttcaccaccgataaaagccagagcaaagtagccgacagcgtaggtttcgccgccgcgcccaccgaggtcaccgataaaggttcgtcatggctctacgcctggtccctggcgatcccggccacctccaagcacaaggacgccgccaaggcctttatcagttgggcgacctccaaggactacatccagctggttgccgacaaagaaggcatcaccaacgtgccgccaggcacccgccagtccacctataacgaggcgtatctgaaggctgccccgttcgcccaggtgaccctggagatgatgaaacacgccgaccccgcgcacccgtccgccaagccggtgccgtacgtcggcatccagtacgtgaccatccccgagttccaggccatcggcacctcggtcggcaagctgttctcggcggcgctgacgggtggcatgtcggttgatcaggctttgctgcaagcgcagtccactaccgagcgcgagatgaaacgcgccggctatccgaagtaacttttgacgggacatacccatgaaacgactggaaggtaaaagcgcgctgatcaccgggtcggcgcgcggtatcggccgcgccttcgcccaggcctacatcgaagagggcgccacggtggccatcgccgatatcaacctgcaacgggcccaggccacggccgccgaactgggcgcgcaggcctatgccgtggccatggacgtcaccgaccaggcctccatcgacggtgcgattgcggccgtggtggcccaggctggcaagctggatatcctggtcaacaacgctgcgctgttcgacttggcgcccatcgtcgacatcacccgcgacagctacgagcggctgttctcgatcaacgtcgccggcacgctgttcaccctgcaggccgcggcgcggcagatgatcagccagggccatggcggcaagatcatcaacatggccagccaggccggacggcgcggcgaaccgctggtggcgatctattgcgcgaccaaggcggcggtgatcagcctgacgcaatcggcggggttgaacctgatcaagcagagtatcaacgtcaatgccattgctcccggggtcgtagacggggaacattgggatggcgtggatgcgttgtttgccaagcatgaaggattggcacctggcgaaaagaagaagcgggtaggggccgaggtgccgtttgggcggatgggcacggcgcaggatctgaccgggatggcgatcttcctggcgtcaaaggaggccgactatgtggtggcgcagacctacaacgtcgatggcggcaactggttgaactaggacccaatgtgggagggggcttgcccccgatagcggttgggcagtcacagttgtgcaatctgacccactgctatcgggggcaagccccctcccacagttgagcctctttgttcgttgactcggggctaatccgcaaagctgcggtcgaagaagtaaacctctccaggcttgaggttctccaccgttgcctggggcctgccgccttcaccctgtttcttgcgcccggtctcacgcaagtacccggcctccgccagcttcaacaaccgctggcgaatactggtcttcaacactggccgcgccagcaccagggaaaaaatcgtggtcgcttccggcgcactgaattcattgcccagaaacatcagcggcacgctgctgtacaacgacttggaaaacaaacgttcctgcaccttcgccacaatgctgttgtggtcgaacggcaacttgatgccgccactcgccaccgccgtcagcgaaaaccagccctggtgctcacccagcgtcacgtcctcgttcacgatcgccaggtaatgggtggacgacgaccagcagcgcggatcgcgaaacgcatcccccaccgtccccacctgttcgctccaggccaggtccagtccgaccttgtcacttgctcgcaagcgctccaccgcatcctcgaggctcagatcttgcacgccgccattcaccaccacccccggcaacgcccagtgcccggcgaagggctcggcgtcgcgctggttcagcagcagtttcagttcgccagaggcacggcagtaaaacagcacgcacaggtcgacggtatggaggtaggcgctacggggcatgtgatgtccttctaaacagcagtgcggcacagtctaacggatcgaacagatatgtcatgtactgactccaggatagataagtaaatgtttcttgcaatgaaagtacatgacgtgtacttttgtttccaggccacaggagaaccaccatgaccctcgcgacaactgccattgcctcattcgacgtcgacgcccagaagagcttcacgccgctgtgccccaacgagttgccggtggccggcggtgaccggatcggcgccgagctcaactacatggccagccttgccggccatcgtatcggcagtaaggacgcccacaccccgcacgcgccctgggtggtggcgcagcacagcgacatgttgcaacccaccggcctggaccacgccgatgtgacctgggtgagtcactgtgtgccgggcaccgaaggcttcaacctgctggacgagttgcccacgccctatgactacgactacttcatctggaaaggcgtcgaacccgacctgcatccctacggcgcctgctaccacgacctgcacgacaagctgtccaccggcgtcatcgagtatttgaaaggccaaggcgtggttcgcgtgatcgtcggcggcctggccctggattactgcgtcaagaccaccgcgctgcagttgctcaaggccggcctggaagtggtactgcacttgccggcgtgccgaggcatcagcgaggagggcggtgtacaggcggtcaatgagttgctcaaggccggtgctgcgatcagccgcacccgcgaagaactggccgcgatggccacgcgttaaggagaaacaccatggaaagtgcctacgactacgaatccccggtgatccagggtttgctcgacaccgattactacaccttcaccatgatgcaggcagtgttgcaccagtaccctaacgtcgatgtggaatacaacttcatcgtccgctccagggaaaaactcggccacctgattcctgaaatccgtgccgagctggagaaactcgccagcctgcggatgcgcgaaggcgaactgcgcttcctgttcaaccctcgttttcgcgaatacctcaccccggattacgagcgcttcctcggcttgttccgattcaacctgcgctacatccacgtcagtgaagtcgacggccaactcaacatccgcgtggttggcccgatgctgcactgcatcatgttcgagcaaccggtgctggcgttggtcagcgagctgcgcaaccgagacaaataccccgacgtgaccctggaagacgtcacccgcaagctctaccagaagttcgactggctggagaaaaacctcagccgcgatgaactggccgacctgcgtgtgtcggacttctccacccgtcggcgcctgtcgttcaaggcccagcgcgaagtggtggacatcatgcgccgcgacttccccggccagttcgtcggcaccagcaacgcgcacttggcctacgaattcgacctgccgctgatcggcaccatggctcaccaatggctgatggtgcaccagcaactggggcgcctgcgcgagagccagaacgccgccctggaaaactgggtgcgtgagtaccgtggccgcctggggatcgccctgaccgactgcatcagcaccgactttttcctcaaggacttcgatctgtacttcgccaagctctacgacggcctgcgccaggactccggcgatcccatcgtctgggccgacaaggtactggctcgctacaagcagctgggtatcgacccgatgaccaaggacctgatgttctccgacggcctgaacttcgaaaaatgcctgccgatcctgcgtcacgtgcgcggcaaggccaagttcggtttcggcatgggcaccagcctggcctgcgatgtggacggcgtggagccgctgagcatcgtgatgaaactggtgcgggtgcacggcgagccagtggtgaaattctccgatgacccgatcaagaacgtctgcgaagacgcctcgtttttgcagtacgcagcacaagtgttcaacgttggcagtgtggaggtgtgacatgcaagaacgtatcgcacgggaactgaacatcaatcgcgcgttgacccaaggcggcgaacccgaggaaatccaacggcgcatcgacttcatcaagaccaccttgcgccactcaggctgcaaggccctggtattgggcatcagtggcggcgtcgactccctcaccgccggccgcctgtgccaattggcggcagagcaactgcgcagcgagggctacaccgcacgctttatcgccatgcgcctgccctacaagacccaggccgatgaacgtgacgcccaggcctccctggacttcatcaccccggaccacatcgacaccctcaacatcgccgccagcgtcgacggcctgatggccagcctggccgccgccgaagccagcgccgagcatgtcgatttcatcaagggcaacgtcaaggcccgcacgcgcatgatcgcgcaatacgccgtggccaacctgcacaatggcctggtggtgggcaccgaccacggcgccgaagcgttgatggggttcttcaccaagttcggcgacggcgcctgcgacctggccccgttgtcgggcctgaccaagacccaggtgcgattgctcgccacggccctcggcgccccggccaatctggtgcacaaacacccgacggccgacctggaagaactggtgccgggcaagctggatgagcatgcctacggttgcacctacgcagagatcgacgcctacctgatgggcgaaccggtgagcgagcgggtgaggacgattgtcgagggggcgtacagcaagacagcgcacaaacgtgcgctgcctatcagtccggcttgagttgacgatcagattttgacgttttcgcggatgttccagccgaaccgaatcggcccgccatcctttccgccatcggccttctggggctgatagctgacttcgatcctggcgaagttaaggctgatttcctctgtcagtaggtcatgggttgtcgctgcgcgcgtgtcgtaggaggcgaccatgacttccttcaaggtgatcaccaggtattccacgctgttatcgcccccagccttgcgtaccacgatgcgcgcttcgggataatgcttgccggttgcgcaggccatcatcaggttgggcgaggatttatccagtgacttttcaatcgcgatattggccatatccaccttgccggcaccaccgcctgtaccactgtgcatcgagcctgactgagtcatcctccagccccagcgggaaatatcgatttcatcgcgatgcgcctggtccctggactcgcccttgatgtcccccagcttcaaaaacatatcggttgccatgtccgctccttgtcttgtcatccgccggtagtggcgcggggcgtacttttccgattccgacgattgaccgcaagacgctaaggcgagaacgggaagtgcctgtctacaaaaaggaaactttccgacattcttgccggatattgattctttacgctctgcgctcttgtgaattcaggagtcaaggaatggcgaccagtgtattgagggacggcttccccagtgcccacctcgcgacgcgtgaacgggtggaaagcagcattgatctacgccggttgtttgcggctatcgacgccgatccggcgattgccggggcgggggtggtgtatctcgattccactctgtggccggtgacgttgcgtgagtttcaaccgatttgcagcgtgttgcccaagcgggtgatcttgcgggaaatgccggcttcgatggcaaggttggattttgtgcgcaggttggagcatgagccacgggagtcggagcttgtattcgaggcgcttgggatgggattggcgtgtgggagtgtggttttaggttggattgtcgcggtcagtggcaccgttgccattccattttcggctggcgccagttcagtgattgccgctgttggttatacctctgctgcagcaagtttcgttcaatgtgtcgttgggggataccgtgtgtacaacgagctcaccgagccttcgaataacgaatcattggacagtgatcgctggtaccaacacgtaaccgctgcattggacgcagtcgcactggtgggtgcaagtacctcgttcctaacaaccctgagattggttaaagcaacgaaggtgagtaccggaaagaattggcagcaggtattgagggggcttacccgacaagagcgagcgaagctgacgaaggagttactgagtatccagcatccacatctatcttcgaaaatgttgaggttaaggcagctggaaggacatttacctaagcgactgacaccagcacagttgcgccacgcgacagtaactcaaattaaagatgttctaggtgcatcaatgactgtgatgggcagtgctgtatccggcaatcttcacacaattgccgtaggcctccatgaggagtttgaagaatgatctttctgatgacgcctgaggaattttggtgtttcctgaaacgttactttccggttcttatgggggcgctttttgctcaaggctttgccgttgcaatcggcgtaccgatgatctttgacggttactttcatggattacctattgccgacaatctcaaatattcctttttttcagttctcggtttggcttttcttattgcccactgcaatttcatggtcgtgcgtggctatccaggttggttatggatcccggtgatcctgatggtattaagtctgttcggtgttttaccaacagtcgaataccaccctcacaaggtgttctatgtgctaggccttttattcccgctgatggctctgttgctgctcaatagtaaacgtcaccgagaagctcgagctgaatgggtaaaacttcgtcaaaagcgtcagcgtatcgcgaagataatccgtacccagcgtcaacgagttaggcgccgggcaggattatgaaggcctaccgctcgatcgaccgactccaccgcgcattccactccggccgtgcctggttgacctggtcccaatcgatcgaaatcgccgtctgcaagtaaccctgcatcgcttcgacccgcgcacgggtcttgtcggtggtcggcgtagtcgggttcgaggggatctggtcgccttcttccagcgcaggggcctgggcttcggcggtcagcaggaaggccgcaagtttctgcgccagttccggctggtcattgcgcgcaatcacgcattcggccacgttcagcaccaccgcgccttccttgggctgcgcgtattccatgggcacgccgagcagtttctgggtggcgacctgggttggggtgagggggaagatcgcggcttcgtcggtctgcaccatctcggagattttcgccgagctggcgatgtattccagcacgttggggccgacggtctttggccaggccttgaagccgggttccacgttggtttcgtcgccgccctggatgcggttgaacatcaggaaaccgtgcaggccgaaggtggacgacgccagggactggaacaccactttctccttgaagcgcgggtcggccaggtccatccatgaagtgggcgcggcccagcctttttccttgaacattttcgcgttgtagcccagaccggttacgccgagggtcacggctacggcttcgtccttgatcttcgccttggccgggatctgctccagggtcgggctcggcgccagcttgtcgcacaagcccatggagatcgcgcggtacatgatgccgtcgtcgaggaacatcacgtgcatctgtgggttgtctttgttggcctggaccttggcgaggatgtccgacgaggtgccgggcacgatcaccaccttgacgttattcgctttttcgaacgcgggcagcaccttgtcggcgtacacccgttccatggtgccgccgttcatgcccaggtacagcgtgggcgcggcgtgcgccgttgaggcgagcagggcgagggacaagcaggacagcgcgatacgtgggttcatggatgtttttcctctcaggcttggaaacgacggatggaaaacgcttcgatggggtggcggctggccccgctgcagacgatctctgccagggcttcaccgaccgcgggaccgagctggaacccggcgccggcaaagccgaaaccgtggagcaagccgggttgggtgctgctggggccgatcaccggttcgtgatcgggaaggtaaccttcggtgccgctccaggtacggatggcctgggcgcccttgagaaaggggtagagttcgccggcgttgcgcaggatctccagcaccgccgcctgccctgggcgcgcggtcagcgggccgagggcaaagccgcgaccaccgccgaggatgcaattgcccctagcgacctgccgcgcataaatcccgccaccttcaacgccggtgctcacgttcatcaccaccggcaagggctcggtgaccagcatcgccggatgcgccgaggtgatcggcaccgcttcgccaaactgcgcggcgacgcttccggcccaggcgccggcgcagttgagcagccatggcgcttgcaggtgcaggccgttggcgcagttcacctggaaccggcggctgtcatgttcgatgcggatcacctcggcctgctcgtacacgacggcgccataacgctgtgcggcacgggcgaaggcaggagacaccaggcgcgggttggcatgtccgtcttccgggcacagcgaggcgcccacggcaatatcgccgacccaggggaagcgtgcgcgcaattcggcgtagtccagcaactgcaggcccaggccaaagccacgggtctgctcggcgtacgcctgcaacgcggcgaaatcggcatgactgcgcgccagcttcaaatgcccggagcgcacgtattcgccgtcgatgccgatcaaccctggcaagtcggcccacagttgatgggcgcgctgggacaatggcagttggtgcaagggccgaccctggcgccgcacgccgccatagttgacgccactggaatgcgagccgcaaaaatcccgctccaccaaggccacgtgctggcctttctgcgcgagcatcaaggccgccgaggcgccgacaatgccgccgccgaggacgatcacgtcgatcatggctgcacctccacgccaaacggcagcggcttgatcggtgcctggccgcgcaggcggcccacgtgttcaatggcgcggccgctgcgttcggcgacaatctccgccgccgccagcccacacatccggccctggcagcggcccatgccgacgcgacagtgggccttgacccggttgagctcccagtggccttcatccaccaccgcgcgtatctcgccggcgctgacttcttcgcaacggcacaccattaacgcgtccggcgcctgggccgcccattgctcggggaaggggaacgcggtttccaacccatgacgaaaacgctggatgcgcgccagttgctgctccaatacggcggggcggcgctgatcaatcgccacgccagaatcttccagcaccgccaatgccgcacgttcaccggccatttgcgcggcgtccgcacccatgatgccggccccatcgccggccaggtacacaccgtcgacgctgctgcgcccggcgttgtcccgttgcggcaaccaggcacggttcaaggtgttccaggcgaactcacagccgagcaagtccgccagttgggtctcgctgcgcaacgcgtgggcgaaagccacggcgtcgcattccagacggtgttcaccccaacgaatgccgctgactcgctgttctccgtcgatcttctgcagcgtggcgccctgatgcacggcaatcccatgggcgctcagccaggcgcggtaatacaggcccttggccaaggtcagtggttgcccgagtagcgccggcagcgcacggcactgtgcactgaacggcgcgctgtcgagtaccgccaccaccttggccccggccttggcatattggtaggcgaccagatacagcaacggcccgctgccgcagaacgccacgcgctcaccgatggcgcagccctggtatttcaaggcgatctgcgccgcgcccaggctgtacacgccgggcagggtccagcccggcaccggcaggatacggtcggtggcgccggtcgcgacaatgatcctggtgtattcgacgctctcggcccggccgttgttgagcatgtccaggcgaccgtcctcggcattccacaccagggtttgcggtcgatagtcgatcagcggcgccagctcatctatcgtgcggtgcacggcttgggccttgctcgcttcaaatccgtagatctgcctggcggtgcgctggaagcccaggggttgccgccgatagatctgcccgccgccgcgcaggctttcatcgatcaggcacggtgtgatgccatggtcgagcagggtgcgcgccgcgctgatcccggccgggcctgcgcccacaatcaccaccggcttcatggctggcgccccgggtcacggctgatcgcctggccttcttccagcagcgtcgagcaggcgcgcacgcggcggccgtcctcaagccgcacccagcagtcctggcaggcgcccatcaggcagaaaccggcgcggcgctcggcgctgaagtcactgccgcgcaggtgttcggcgcaggtcagcacggcggtgagcaaggtatcgccaagcaagccgctggcgggttgaccgtccagggtaaaggacagggcagggcggccggtctcggccacacgtttgaacaaggccatcaatgtttccccaccagcacgcggtccaggccgtagacccggtccagcagaatcatggtggccgccgtcaacgcaatcaccagcgccgacaccgccgccatcatcgggtcgatggactcggtggcgtacacatacacgcgcaccggcagggtttgcgtggccggcgagctgacgaagatcgacagcgtcacttcatcgaaactgttgatgaacgctagcaaccagccgccggcgacaccgggcagaatcatcggcagggtgatctggcgaaacagcgtaaagcggccggcccccagggattcggcggcctgctcggcactgcgatcaataccgatggcggccgccagcaccaggcgcagcacatagggtgtgatgatgactacgtgcgcgagcatcagccaggtgaagctgccgttgacgcccatcaatgcgaacaagcgcagcatcgccacgcccagcaccaggtgcgggatgatgatcggcgacaggaacaacgcgctgaagaagttgcgccccgggaacgtgtaccgactgatcgccaacgccgccggcaccgcaatcaacgtggccaggctggctgcggtgaaggccaggaccaggctgttgtagaacgcctggataaagtcggcccgctcgaacaccgcgcgaaaccagcgcagcgagaagcccgaagtgggcaggctcaaggtgttttccggggtgaacgccaccaggcacaccaccaccagcggcgccatcatgaacagcaccaccaagccgtggaaaccgagggccaaaggaccgtttctggacatgcgcttaaacccccagggactttttatagcggccttcgaccatgcggttccagctcagcatgatcagcagattgaccaacagcagcaccaccgcgatggtcgcgcccatgggccagttgagttccgagaggtactggtcgtacaccacggtggcgaccattttcaggcggcgcccgccaagcaggccggggatcgcaaaggagctcgcggccaggccgaacacgatcagggtgccggacagcacgccgggcatgacctgcggcagcacgatcttgcgcatcaccgtggcctggctggcgcccagcgacaatgcggcctgttccgccgacgggtcgagcttctgtagggaggtccacaccgggatgatcatgaacggcagcatcacgtgcaccagcgcgatgatcaccgcgaacggcgtgtacagcagcttcaccgggcgcccgccgagcagttggatcagttggttcaccaggccatccgcgcccaatagcaggctccagccgaaggcgcgcaccaccaccgaaatcagcagcggcgtgaggatcaggatcaggaagatcgagcgccacggcgtgcccatgcggctgaggatgtaggcctcgggcacaccgatcaccacacacagcagggtcaccagcgcgctgatccagaaggtgcgccagaagatctcgtagaagtacgagtcgctgaacaatgacaggtaatgggccaaggtccattcatcggccttcacgcccacctggtagtcgaacacgttgaacgacagcaccagggtcaggcccagcggcaaaaccagcagcccggcaaacagcaccagcgccggcagcgacagcaggtaaccgcgactcatgcgtgcacctcgtcggctgccagtacgcgcagcaagtccgcatgccagtccaggcccactgccgcgccgcagcccagcggtgcgctgccatcgttgctgcgcaccacggtgatctcgccgaggtcggtgtggatgtggtacagccattggctaccaaagaagtaacgatcgagcaccttgccttgcaggcgaccggcacccgcgtccaccagcgtgatcttttccgggcgcaggctcaggaccagctcgccgtcgccgcgttcatgccgtacttgcggtatccccaactgatcgtaatcgccagccagcaggttggccttgccgacgaagtccgagatgaagcgcgtgcgtgggtgttcgtagagcttgtacggcgcgtcgatctgggtcacgcgcccggcctgcatcaccaccacacggtcgctgatggacagcgcttcagcctggtcgtgggtgaccatcaaggtggtgatgccgacggcgcactggatgcggcggatctcgaactgcatctcttcgcgaaggttggcgtcgaggttggacagcggctcatcgagcagcaacaccggcggttcgatcaccaacgcacgggccagggccacgcgctggcgctggccgccggacagttcccgggggtagcgctcggcatgctgggccaggcgcaccagttccagcacagttttcaccttgctggcgatctcggcggccggcaccttgcgcatcttcaggccgaaggcgacgttgtcgcgcacgctcatgtgggggaacagcgcatagctctggaacaccacgcccaggccacggctggcgggcttggcgtgggttatgtcgcgcccatcgagcaggatctgcccgccgctcacgtcaacgaagccggcgatcatttgcagggtggtggtcttgccgcagcccgaggggccgagcagggaaacgaactcgcctttttccaccgccaggtcggtggcgaccaccgcgtcgacggcgccgtagcgtttgctcaaggcgttgagttggagaaatgccatgtctgcgttccaccttttttgagtcgcgtcgaaacgcgcttttttgttttgggcagatgcgaatgagctgttgccggtgcgttggcgctcgatcttgagtcggctgccggttgttgttcatttcgcccctgtggacgcagattaggacgaagactaggatgggcggaagatggaatttcactgaacggactattattttcagatttattcactcaccggaatttaccaagagattgagtgttatggattccactgatcgaaatcaaagccgcaaagaagtcggggcgggcggggtgtctcgtctattcgcgctgttgcgcaccctgggtgacgtgccggagggcggcgaacgcgtcacccagctggcgcaacaggtgggtctgtcgcaacccaccacccatcggctgttgcgcagcttgatggacgaaggcatggtcgagcaggacgcccgcagcaagcgctatcgcctgagcctggagttcttcgccctggcggcaaacgcgagcaagaccggcaacctgcgcgacctggtgcgcccgagcatgctgcgcctgagtgcgtcattgggtgactcgctgttcctgctggcgcgcagcggcttcgatgcgatctgcctggaccgcagcgaaggcccgtacccgatccgcaccttcaccggcgatatcggcgggcgcgtggcattgggtgtggggcagggcagcctggcgatcctggcctttctgccggaggaagagcgcgaaaccgtgatccgctacaacctgccacggctcaaggacttccacctgtatgacgaagtgctgttgcgctcggaagtggagaacgtgcgtaacctggggtatgcggcgcgcaataccggggtgctggaaggcatggccgggttggccgtacccatcctcaatcgggatgggcacgcggtggcggcgttgagtgtggcgaccatcagcgatcgcctggggccgggccggttgccgatggtggtggagttgctcaagcgcgaagcggcggcgatcgggccacggatcaatccgtttgatccgacgttgcgcaggccctcacaaacctttggcggataacccatttcagccacgatgaagatcaaaaagtctgagcgggctggctcgcgagtgaggtgggtcagcccttgtttgtcggcgcagtgggattaatcatcgtttccggccttacccgttgttcgtactcttcggcgctgatcaagcccaattgcacggccgcctccttgggtgacaagccctcgtccgcggccttgcgggtgatctgggccacgcggtcataacccagcagcgggttgagcaccgtcgccatcagcaatgaatgctccacgttgtgtgccaactgcgggcggttcacctccaggccgctcagcagcttgtgggtgaacaggtcgacgccgtcggtgagcacgtcgatcgattgcagcaggttatggatcagcaccggcttggccacgttcaattcgaaggtgctcgaagcgcccgccagagtgatcgtggtgtggttgcccatcacctgcatcgccgcctgcaccagtacttcggcaatggtcgggttgcgtttgccgggcatgatcgaggaggtcaggccatcgtccggcacgatcaattcacccaggccgcagcgcggacccgaaccgagcaggcggatgtcattggcgatcttggtcaatgacacggccagcacattcagcgcgccagaggcttcgaccagggcatcgtgggtgcccatgccttcgaatttgcacgggttggtttcgaagggttcgccggtgagccggctgatttcctcgcagaacgccacgtcaaaaccgacaggtgtattcaacccagtgcccaccgccgtgccgccttggggcagcaggcaaaggcgcggcatgcacgcttcgatgcgcgcgataccgtgctggatctgctgggcaaacgcgccaaatgcctggccctggctcatgggcaccgcatccatcaggtgggtgcgaccgattttcagcacgtcctgccaggcgtctgccttggcgttgagtccatcacgcagatggcccaatgcaggcagcaggcgaccgcgcagttccagcacggtggtcaggtgcatcaccgtggggaaactgtcgttggacgactgcgagcggttcacatggtcattgggatgtaccggcgacttgctgcccagttcaccgcctagcgcgaggttggcgcggttggcaatcacttcgttggcgttcatgttggtctgggtgccggagccggtttgccagatcgacagcggaaagtgcaggtcgagctcgccgttggccagttcgtccgcggcctgttcgactgcctgcgccagggccggtgccagcgcgccgaggcgtgcgttggcacgggcacacgcgcgtttctggtggccgaaggcgcggatcaggctggcggggaacggctgtttgccgccgaacacctccagtgcccgctgggtttgtgcgccccagtagcggtcggctggtatggacaccgggccgaacgcgtcgtgttcgattcgctgagtagtcatcaggagcctcgttaaagcgcagcgccggcggcacggccgagcacgcgttgatattcaccctgggcggtctgctgggagaactcgccggaccatttcgataccaccaccgtggccacgctattgccgatggtgttgcaggtggcaatcgccatggacatgaagcggtacacgccgaacagcagcgccaggccttcggccggcagtacgccgatggcggtcacggtcgcggcgaacaccacaaagctgccacccgacaccgccgccgcgcccttggaggtcaccaacatgatcgcaatgatgcccagttgttgttcccagctcagcggcacaccgtaggcgttggcgatgaacagcacgcacagcgacatgtagatcgatgtgccgtcgaggttgaacgcatacccggtaggcagtaccagaccgacgctctgcttggagcagccgaatttctcgagcttttgcagcaggcgcggcagggcgctttccgacgaggcggtgccgagcacgatgaagatttcatccttgatataggtgaggaagcgccacaggctgaagccgctcaaccggcacacggcgcccagcaccacaaagatgaagaaggcgatgccgacgtagaacatcaacaccaggttggccagggacatcagcaccgctgtgccattgctgcccaccgcgtatgccaccgaaccgaaggcacccaggggcgcgaatttcatgatcaggttgatgaactcgaagaagcattcagagatacggttcaggccgtcctcgatcacttcccggcgctcgggcttcagggccagcagggcgaagccgaacagcaccgagatcaccagcacttgcagcaactggccgccagcgaaggcaccgacaaaattgtccgggaagatgccgtagataaagtccatggtcgaggcgggcgcatgccccttggctacggcggcactcgcggcggcggcagcggcgctgctcgggtgggcgtcatgcatgccggagccgatctgcagcaggttgccccacaacaggccgatggccagggcgatggtcgacaccacttcgaagtaaatcagcgcgcgcaggccgaccttgccgacccgcttgatatcaccggccgaggcgatgccgtggaccactgtgaaaaacaccagcggcgcgacggcggtcttgatcagcttgaggaagatatcgccgaggatcttgaaactggcggccagctccggagcaagaaagccgaaggcaatgccgaggaacatggcggcgacgacctggaacgtcaggtccttgtagagcggttttttggcgggggtggatgacatgtctgtgatctcattgttgttatggttcggatgacgctctgtgggagggggcttacccccgatagcagggtgtcagccacctgatttttcccggatacaccgctatcgggagcaagccccctcccacagttggacctccattggttttcaggtcagcgggggaccgcgccctggcgcgccagcgcgatatccaccatctgcggcgccagccccagatagttggcggggtcggtcaggcgttgcagttcggccacatccaattgcgcagtggcttcgccctgggcgagcagggcgtcgagcaggctggtgccctggtcgttggccatgcggcacgcggcgtacaccacatcgtgggccacctggcgaccgagggccggggcgaggcccatcatcacggcttcggcgacgatcaggccctgggtcatgtcgaggttcctgcgcatgcgctcggggcgcacttccaggccggcgagcatgaaggtcgcctggccgagggacgcggcgctgagggcgaaagcttcggggatggcgatccactccgcctgccacgggccggtagagcgttcgaagtcctggatcatcgcgtcgagcatcagcccggcgtgttggcgcacgcccttggcggcggcatacatcagctcgcaggaaatcgggttgcgcttctgcggcatggtgctgctggcgccacggcccttgacgaagggctcgtacacttcgcccagttcgctggtcatcatcatcatgatgtccagggcgatcttgcccagggagccggtgaccaggccgaggaagttcaaggtctcggccagcccatcacgggccacatgccaggtggcttgcggcacgcccaggccgagttcggccatcaaggcttcctgcacctgcaaccctttgtcgcccagggaagcgagggtgccggccgcgccggcgaattgaccgatttcgacccgtggacgcaactccaccaggcgctcggcgtggcgatcaaacatgctcagccacaccgcgcacttgtagccgaaggtgatcggcagtgcgtgctgcaagtgggtgcgacccgccatcggcgtgtcgcgatagcgcgcggcgaggccagcgagcaggccgcgcacggtctggatatcacgctcgacgatggccagcgcagcgcgtatttgcaggaccacggcagtgtccatgatgtcctgggtagtggcgccccagtgcacgtagcggccggcttcaccgcagatgttcgacagttgctccaccagcggcaggatcgggtaaccgactatctcggtctcgtgctgcatcagcgccaggtccagggcttcgtaccgcgacagcgcggcgatctgctcggcggcgtcgccggggatcaccccgcaccgcgcttcggcgcgggccagggcgacttccacttcgatgtaacgctcgatcagtgctttatcagagaacacgccgcgcatttcggcggtgccgaacatgtcgcggaacagggcggaatcaaaaacggtactcgacatgggcaaatcctaattgttatttttaaatcatacatatttaatatgtccgtacaatatgattgcgcctgtgctgatacactgtcaactcgactgcgagggtaaaaatggaaagtgtgagccagaggcgttatgcggcggtggccaaggacctgatcgatcagattggcaatggccattacccggtagggtcgttattgccgactgaattcgaactctgttctctgtacgcagtgagtcgccacaccgtgcgcgcggccatcgaccagttgcaggggcagggcatggtctcgcggcgcaagcgtgtgggcacgcgggtcgaagccgcttcgccccagggcgggtattcccaggcgatggcctcggtggccgacctggtgcaggtcgctgaaacccatatccgggatatccaaggcgtacgcgaattcgtcgtcgatatcgcccaggcccggcgcctgggactggagccgggtgggcattatttctgtgtgtcgagcatcaaggtcgatgccagcgccggcaatgcgccgctgtgctggaccgacgtgtacgccgaacaggcctttgccgaagtgatccccgaagcgcgcaagcacccggatgaactgatcgccgcgctgatcggcaaggcgttctcgcggtctatcgatgtggtggaccagcaagtgcggccggtgcagttgtcgaccgaactggcggccagcctcaaggcacagggcggggcgctggggctgaatatcatccgccagtatcgtgatgaaaatggcgggctgattgcggtgtcggagacggtctatccagcggaccgtttcaccctgaccatgcagatgaagcgcgacaagctctgatccatacgacgataaccttgcatctggtaaaactttggctaatatgacccgggtaaaacatatatcacccgggtaataaatatgcctacgcgcacacttcctgcttgtaccgcctttatccgccaccagcgtgtggcggcaggttcctatacggacgtcgccaagacgctcgccgagcttgaccagcccacgggcagcttcctggtcttcgacgatgccaccggtaaccaggtcgattttccctggcccgcaggctatgcgcccgaactaccaacccaggtcgacgtgaccgacgagcctcccactccccccttggtcggacgcccgaaactgggggtggtcgcgcgggaagtcacgctgttgccgcgtcattgggaatggctgggccagcaacgcggcggtgcttcggcggcgttgcggcggctggtggatgaagcgcgcactgcccatgcttctcgtgaccggatacgccaggccaaggaagccggctatcggttcatgagtgccgtcggcggtgacctgcccggttttgaagacgcctcgcgcgcgttatttgcctttgatgcggcggacttttcccgcaagatcgcgcactggcctgtagacgtgcagacctacctggcctggctgtcgcgcgacgcgttccctgtctgacaacaactcctggattcgaacctcatggacgtcacccagcaacggccgttgtggcagatctacctgatctttctggcaccgatggtgctgtccaacttcctgcaaagtttttccggcaccctcaacggtatctatgtcgggcagatgcttggcacccaggcgctggcggcggtgtcggggatgtttcccatcgtgttcttttttattgctctggtgatcggcctgggggccggcgcctcggtactgatcgggcaggcgtggggcgcgcaggaaaccgcgctggtcaaggtgatcactggcgccaccctgacgctgggcgcgttggtgggggtgatcgcagcagtactcggtagtctgtttgcacgcccggcgttgcaggcgctcggcacgccggtggatgtgctcgacgatgccgtgggctatgcgcagatgatgatgttgatcatgccgctgctgctggtctttattctctatacccaattgctgcgtggcgtcagcgacacgatctcgccattgctcgcgctgatggtctctaccctggtcggcctgctgctgacaccggcgctgatccgtggctggatcggcctgccgcccctgggtatccagagcgcggtctacgccgggttggtgggtaatgctgcggcgatgctgtttttgatcctgcgcctgcggcataagcatcatgtgatggcgccggatcgcgaactactggcggccctgcgcctggatcgggtcattctcggcaaggtcctgcgcatcggcttgcccacgggcttgcagatggtggtgttgtcgctgtcggaattggtcatcctcgctctggtcaatggccacggttcccaggccaccgcggcctatggcgcggtcacgcagatcgtcaactacgtgcaattcccggcgctgtcgattgccatcaccgcatcgatcctcggcgcgcaggcgattggtgccggccgcctggagcgcatcgggccgatcctgcgcaccgggctgctgatcaacacctgcctcaccggtgggctgatcgtgctcggctacctgctgtcccactggctgctcggcttgttcatcaccgatgacgcggcgcgggccaatgccgagcacctgctgcacattatgttgtggagcatcctggtgttcggtttccaggcggtggtgggcgggatcatgcgcgccagcggcgtggtgttcatgccggtggcgatctcgatcttctgcgtgctctgcgtggaactgccgatggcgtacgtgctcaacgcccacttcggcctggaaggggtgtggatggcgtttccggtgacctacctggccatgctggcgttgcagactgtgtattaccggctggtgtggcgacacaagcagatcaagcggttggtgtaaggctcaggccgcgcagcaacagttccaggctctgcaagccttgctccagccgctcgtccgggtgttcaccccgggcgatccacaaagcggtgttgagcaagcttccattgatcaactgcgccagtgcgtggctcggggcagggtggataacaccggtttgcatcaacgcctccaggcgttcgcgcagcgattcgacacagtgttgctgagagccggtgtcgcccagaacggctggcgcgtcctgcaacacaatgcgctggatctcactgtcttgagccatgcgcaagtaggtgcggcaacgttcgcaaaaaccgacccaggggtcggtggcctcagcggttatgcgctgcaggcgcgcatccatctcgctgtcgagctgggccaccacggccgccaacaagcccttcttgtcaccaaaatggtggtacaacgcaccccgggtcagaccggcgcgggcggtgaaatcgtccattgaggtattggcgtacccttgggctgcgaaagcttcgcgggcgctggcgatcagcctggcgcgggtgtcttcgatcatttcagcacgggctcggctcatgggtagggctcgcaatgggcaagtgatagattgacatacgctgcgtatgttacgcatgatttgtcacatacgcaccgtatgtattttgcctcgaacagtgcagatagcaagttccggggctttcagaaagaggtcacgcaggatggcaaacccttacgccgaattgttccaggtccctggcgcccgggcttttgtactggcggggatgctggcgcgcatgccggtctcgatgacggggatcggcttgatcaccatgctctcgcaggtgcacggcggttacggcctggcgggctcggtggcggcggtatttgccctggccacggcgttttgcgcgccgcaggtatccaggctggtggaccgctacagccaagggcgggtgttgccgattgccgcgtcgatcggcggcggggcgttgttgatgttgctgctgtgcacccacttgcaggcaccgaactggacgttgttcctgttcgctgccctggccggttgcatgcctaacatgtcggccatggtgcgggcgcgctggaccgagttgtaccgcggccagcccaagttgcagaccgcatttgccctggagtcggtgctggatgaggtgtgctttatcatcggcccgccgatctcggtgggtctgtgcgtggtgctgttcccggaagccgggccgctggtggccgcgttgttgctggcggtgggcgtcaccacctttgtgttgcagcgcgagaccgagccaccggtgcacgcgcatcaggggcatcacggtcgctggctgatcgcctcgccctcggtgctgatcctgatgatcctgctgctggccatgggcgtgatcgtcggcgtggtagatgtggtcagcgtcgcctttgcccagcatcagggccagccggcggctgcgagcatcgtactgtcggtctacgccatcggttcgtgcctggcggggctggcgttcggcaccctcaagctcaaggcgccgttgccccggcagttcctgttgtgcggcatcgccacggcgttgaccactttgccgttgctgctggtgaccaacatcgcagggctggcggtggcggtctttgtctccgggctgttctttgcccccaccctgattgtgtccatggccttggtggaacaggtcgtgcccgccagtcgactgaccgaaggcatgacctggctgatcaccggcctcagcatcggcgtggccatcggtgcggcgagctccgggtggatgatcgaccactttggcgccaccagcgggttctgggtggcgctggcggcgggagcggtcgtgttgggggcagcggtgttggggtatcggcggctaggatgatcagttgatcgcagggcaagcgtctgcgcagtgatgctgcagaaactcgttcaacgcttggcgggtcaggtcattgagcgtgacctttttgcgggttgccgccagcgccgccgccaggtgcaggtcatggccgacccggacattgaaggaacctttgcaaggtttctctggtgcatgccccagggtctggcaggtggcgaggtaatcatccaccgcctcacgaaaggccgtatccagttcggcgacggttttcccttcgtagctcaccagcgccttgatgaacaagaccttgccgaacaggcagttgtcttcgaggctggcttcgatggagccgatgtagccgttgtgtttcagttggttgttcactgaatcagctctcctgatttcaattgttcgatgatctggcgccgaatgtagtgtttcagttcgttgccagggtgaggcttgtgcaaggtgatcattgcactggggtcgccgatgtcgaacttgacgcggcttccagccccttcaatctgtgtgtagcccagccgacgcagcagcgtgacgagctcgggccaggtaaatgtcatttgctcgttgagaaatttggcgagcagcttttcatttttggacacggcgttccctgcgtgtaactaaatgtagttgcaaaaagtggtgttcgtcaatgctagctcgtgttcgggtggtcttcccgagattgatgtaacccttgatgacaccgtgcgccgcgcctgccatccccgctaatttttccctgtccggttcgttttatagggacgacgtgcctttgtgcttcctgcctactgctccggactccaagaaatgaatgctgaagactccttgaaacttgctcgccggtttatcgggttgcccctggaaaaacgccaattgttcctgcaggccctgcagaaagaaggcgtggatttttcccggttcccgattccggcaggggtggaggcgcaggatcgccaggcgttgtcctacgcgcagcagcgcatgtggtttctctggcaattggacccggccagcggcgcctataacctgccgggagcggtgcgactcaagggggcgttgagcctcggcgcgctggagcaggcgttcgccagcctggtcacgcgccacgaaaccctgcgcacagtgttccagcgccaggcggacgagcgcctgttgcaagtgccggcagatacctggttgaccgtcgagcacctggacctgagtcacctggccgccgccgcgcgcgaacaggccgtcaatgaggccgcgacccgtcaatccctgctggcgttcgacctggaaaacggtccgctgctgcgcgtgcaattgctcaagctcgacgcgcaggaacacgtgctgctgctgaccctgcaccacatcgtctccgacggctggtcgatgaacgtgctgatcgacgagttcatccgctgctatgacgcccacgagcgcaatgaagccccgcaactgccggccttgccgatccagtacagcgactacgccctgtggcagcgccgttggctggaagccggggagcaggcgcgccaactggattactggcaagcgcgcctgggcgatgaacacccggtcctggagctgcccaccgaccgcccgcgcccggccatgccgagctaccagggcacgcgccacaacttcgcgattgaacctgcgctggccacacagctgcgtagttgcgcgcaaaaacacaacgtcaccctgttcatgctgttgttcggtgctttcaatgtgttgctgcatcgctacaccgggcagggcgatatccgcgtcggcgtgccgatcgccaaccgcaaccgcactgaagtcgaagggttgatcggcttcttcgtcaacacccaggtcttgcgtaccgagctgaccgggcaaacccgcatcaatgagctgctgcaaggcatcaaggaacacgcactgggcgcccaggcccatcaggagttgccgttcgagcgcctggtggaagctctcaaggtcgagcgcagcctgagccatacgccgctgttccaggtgatgtacaaccaccagccggtggtggccgacattaccagtgtcagcaccgcctccggcctggaactggcattggtggagtggcaaggccgcaccacccagttcgacctgaccctcgacacctatgaaaaatccggcaccctgcatgccgcgttgacctacgccaacgacctgttcgacgcgccaaccatcgagcgcatggccgggcattggctcagcctgttgcaggccatggtggtcgacggtgagcagcgcatcggcgagctgccgatgttggctgcggatgagcagcaggtgctggtccacgggtggaaccagacgactgaggcgtacccgaccgagcgcggcattcatcacctgatcgaagaccaggcgcaggcaacgccggatgcgccggcgctggtgttcggtgcgaccacgctgacctacgcccagctcgatgcccgtgccaaccaactggcccacgccttgcgcgagcagggcgtcggccctgacgcgctggtggggatctgcgtcgagcgctccatcgagatggtggtcggcctgctcgccattctcaaggccggcggcgcctatgtcccgctggaccctgagtaccctcgggaacgcctggcctacatgatcgaagacagcggcatccagttgctgctcagccagcgcgccctgttgccactgctgccgaccgcgggcatccaggtgattgccctggaccagcccgcgagctggctcgacggttatagccgccagtcgccaagcgttgacctgcaggcgctgaacctggcctacgtgatctacacctcgggctcaacgggcaagcccaaaggtgccggcaacagccaccgtgcgttggtcaaccgtttgtgctggatgcagcaggcctacggcctggacgccagcgatgcggtgctgcagaaaaccccattcagtttcgacgtgtcggtgtgggagttcttctggccgctgatgaccggcgcccgcctggtggttgccgcgcccggtgaacaccgcgaaccggcgcgcctgatcgagaccatcgggcaacaccgcatcaccaccttgcacttcgtgccgtcgatgctgcaggcgtttatccatgaaccgggcgtgcaagcctgcaacagcctgcgacgcatcgtctgcagcggcgaagccttgccgctggatgcgcagttgcaagtgttcgccaagttgccacagacgggtctgttcaacctctacggcccgaccgaagccgccatcgacgtgacgcactggacctgcgtcgacgaaggcgccgacagcgtgcccatcggccggcccatcgccaatctcgctacgtacgtgctcgatgcccagctcaacccggtgcctgctgtggtcagcggtgagctgtacctgggcggcgccggcctggcgcgcagttaccaccggcgcccggcgctgaccgccgagcgttttgtgccgagcccgttcggtgacggtgcgcgcctgtatcgcaccggcgaccgcgtgcgccagcgtgccgatggggtgatcgaatacctcggtcgcctcgatcatcaggtcaagctgcgcggcctgcgtatcgagctgggcgaaatcgagacgcgcctgatgcagcacccctcggtgcgtgaagccgtggtgctggtgcaaggcggcaagcaactggtggcctacctggtgctggaagaccaggcgccggccgacctcaaggcctggctgctcgacagcctgccggaatacatggtgccgacccatatagtgcacctggccaggctgccagtgaccgccaacggcaagctcgaccgcaaggccttgccgttgcccgacgccgcgcctcagcaggcgtatgtcgccccggaaagcgacttgcaaaaagccctggcagtgatctggagcgatgtgctcggcgtggagcaagtcggtctggaagacaacttttttgagctgggcggtgattcgatcatctccatccaggtggtcagccgtgcgcgccaggcgggcattcgcctgagcccgcgggacctgttccagtaccagagcgtgcgcagcctggcgctggtggcgaccttcgagcaggcgcccctcatcgatcagggaccggtcaccggcgaggtgctcctcacgcctgtgcaacacagctttttcgagcaggcgattcctgcgcgccagcactggaaccagtcgttgctgctgaccccgcgagagacgctggagcccgtgcgccttgacgccgccttgacccgcttgatcaaccaccacgatgccctgcgcctgcgttttgtgcagcaggcggatagttggcggcaggctcatgccgagccggttgcgagcgcttcgttatggcagtcccaggtcgccggcgaggctgagttggccgcactgtgcgatgaggctcaacgcagcctcgatcttgaacagggcccgttgctgcgtgcggtcctggcaagcatggccgacggcacccagcgcctgttgctggtggtgcatcacctggcagtggacggcgtatcgtggcgtatcctgctcgaagacctgcaacaggcctacggcaacgccgcgttgccggccaagaccagcgcctatcggcagtgggcgcagcaattgcaggcccacgcgcagacgctggacgcgcaactggcgtactggcaggcacagaccgcaagcgccgacctgccgtgcgacaacccccagggcagcctgcaaaaccgcctgggcagcaccctcgaaatccgcctcagcgccgatcacacccgccaactgttgcaagacgccccggcggcctaccgcacccaggtcaatgacctgctgctgaccgccttggcgcgcgtcatcagccgctggagcgagcagcccgccgcgctgatccaactggagggccatggtcgcgaagacctgttcgacacgctcgaccttagccgcaccgtgggttggtttaccagcctgttcccggtgcgcctgcaagccgaaggcgagctgtcggcggcgatcaagtcggtgaaggagcaactgcgtgcggtgccgcataaaggcattggctacggcctgctgcgctacctcggtgcgcctgacgtgcgtgagaccttgtcgaccctggctgcaccgcgcatcaccttcaactaccttggccagttcgaccgccagttcaacgaagcagcgctgtttgttccggcgacccagggcagcgggcaggcccaggattgcgaggcgccgctggccaactggctgacggtggaagggcaggtgtacggcggtgagctggccctgcggtgggggttcagtcgcgagatgttcgaggtggcgactgtccaacgcctggcggatgactatgacgctgaactccaggccctgatcgaacactgctgcgccacgccggcggggcaggtcacgccttcggacttccccctggcgcgcctgacccagcagcaactggatgccttgcccatcgccgggccggcgatggctgatctctacccgttgtcgccgatgcagcagggtatgttgttccacaccctctatgagcccgaggccgaggcttacatcaaccagttgcgcctggatatcgacggcctggacctgctggcgttcggccgtgcctggcaagccgcgctggaccggcatgacatcctgcgcagcagcttccactggcttggcctggacagcgcgcatcaagtgatccagcgccgagtcgatgtgcagttgcacgtgatcgaagacatcgacgccgattgcgatgcgctcgccgctgccgagcgcgagaaaggtttcgcgctgaatgccgcgccgctgtttcgcctgatgctggtacgcggtgccggtaaggcctggcacctgatcttcaccagccaccacatccttatggacggctggagtaacgcccagttgctcggcgaggtcatcgctcattacgccgggcacagcgtgccggcgccgctggggcagttccgcgattacctgggctggctgcaccagcaagcgtcgggcgaggcgttctggaaggctgccctggcgccgctgcaagcgccaaccctgcttgcgcaggcgctgcgtgtgccggtcgaaggcaagggcatggctgaccatcaggtggtgctgggtgacgacttcacgcgtgccctgagtgagtttgcccgccgccataaagtcaccctcaacaccgtgctccaaggcgcatggagcgtgctgctgcaacgctataccgggcaggactgcgtggcctttggagccacggtggcggggcgctcggcaccgttgccggggatcgagcaacaactgggcctgtttatcaacacgctgcccatcatcagcgcggcctcgccagcgctgtcggtggctggctggctgagcgagctgcaagccctcaacctgagcctgcgcgaccacgaacatgtgccgctctacgacatccagggctgggcggggcagcagggcgctgcgctgtttgacaccttgctggtgttcgaaaacttcccggtggccgaagccttgaaacaaggcgcacccgccggcctgacgttcggccgcctgcataaccatgaacagacccactacccgctgaccctggggatcgaattgggcgccagcctgcgcctggagttcggctacgaccaggcccgtttcagcgctcaacaggtcgctcgattgggaggcaacctgcaccacctgctggtgcagatgctcgcagacgcgcaagcaccgctgggcaacctgcgcctgatggaccccgccacacgccgcgacgttctcgcccatagccgggcgaccggtgccgtcccgcgccaactgcgcgtgcatgaacgcatcgccgcccaggccgccgccacgcctgacgcgctggccgtgcaggcgggtgacgcacacctgagctacgcccagctcaatgctcgcgccaaccggcttgcccatcgcctgctggaactgggcgttggcccaggccagcgcgtcggcctggcggcacgacgtggcccgcagttgatcgtcagcctgctggcggtgctcaaaagcggcgccgcctatgtgccgctggacccgaactatccggccgaacgcctggcctacatgctgacagacagccggctcgacctgctgctcagcgaaaccgggctgctggccgacctgccgttgccccaagggctggcgcgtgagagtttcaccgcgtccggagaagaactggcaggctacccgtcgaccaatccaaccaaccatgccgccgctgccgacctggcctatgtgatctacacctcgggctccaccgggctgcccaagggtgtagccatcgaccatgccgccctcggccagttctgcgacagcgccgaggtctacagcggcttgagcgcggcagaccgggtgctgcaatttgccacgttcagcttcgacggctttgtcgagcaatgctacccgccgctgtgtgtgggcgcggcgctgatcatgcgtggcgacgaattgtgggacgcagggcaactggcgcggcacatcgtcgagcagggggtgaccctggcggacctgccggcggcctactggtatttgctggccaaggaatgtgccgtcgaccagcgcaccctgggcaacctgcgtcaggtgcatgtcggcggcgaggcgatgtcggtggaagggttgcgtgcgtggcacgccgccggcctgtgcgacgtgcgcctggtcaacacctacgggccgaccgaagcgactgtggtgtccagcgtgcacacttgccagttggcggacgccagtgatgcgtttggcgtgccgattggccgggccatcgacggtcgctccttgtatgtgctggacagtggtttcgaattgctcgccaccgagggtgtgggcgagttgtgcatcggcgccgaacacggtttggcccaacgttacttcgaccgcccggcgctgaccgccgagcgcttcctgccggacccgttttccgccgtgcccggcgcacggctttaccgcagtggcgacctggcgcgctataaccaggcgggtgcgttggagtatgtcgggcgcatcgatcatcaagtgaagatccgcgggttccgcgtggaaatgggtgagatcgaagccagcctgcaagctttgccgcagctgcgtgaagccgcggtcatcgcgcaatccagcgcgacgggcacgcagttggtggcgtacgtggttgccgccaacgggcagaccgtggacgctcaggcattggcggccaccttgcgccagtccctgccggattacatggtgccggggcactgggtcgtcctcgacgccttgccgttgaacaacaatggcaagcttgaccgtcgcgcactgccggcaccggacctgaaccaggcgcgccaagcctacctggcgccgcgaaccgcgctgcaaacgcgcttggccgccatctggcaagcggtgttgcaggtcgagcaagtggggctcaatgaccacttcttcgaacgtggcggccactcgttgctggcgacccaggtgatctcccgggtgcgccatgacctgcaactggaagtaccgctgagggcattgttcgaacaaccgacgctggaggcgttcgccgatgtttgcgcagggttgcaggcgaacactgcgctaccgctggtggcagtgacgcgcgaccagccgctggcactgtcgttcgcccaggaacgccaatggttcctctggcaactggacccgaccagcgcggcctaccatgtgccgagcgcgctgcacctgcgtggccgattggatgtcgcggcgctggaacaggcgttccaggccctggtgcaacgccatgagccgttgcgcaccacctttgtggaagagggcgagcacacttggcaacggattcacccgcaccttgcgctgccgatcgaacaccaacaggtcgaggcctgggcgatcgagcctgccgtggcgcaggagatccaacgcccgttcgacttggtcaatggcccgctgatgcgcgtcaaattgcttcaaatcgaggccgagcaccatgtactggtgatcacccagcaccacatcatctccgacggttggtcgatgcaggtgatggtcgatgagctggtggcgctgtatcagggccgggccgaactgccaacgcagctcatccagtacgccgactatgcccagtggcaacgtgattggatggcagccggtgagcaacaacgccaactcgactactggcgcctgcgcctgggcagcgagcatgccgtgctggaactacccctggaccacccacgcccggccgtgcaaagccatcgcggtgcacgccgccaggtgcacctggacagcgcgttggtcgccgggctcaaggccctggcccagcgtcaggacgtaaccttgttcgtgctgctgctggcgtcgttccagaccctgctgcatcgctacagtggtcaatcccagatccgggtcggcgtgcccattgccaaccgcaatcgcctggaaaccgagcgcctggtcggcttcttcgttaatacccaggtgctgcaggccgatgtgcacgggcagatggcgttcgaccaattgctcgtccaggtcaagcagcgcgccctcgaggcccaggcccatcaggacctgccgttcgagcaactggtgcaagccctgcaaccggagcgcagcctcagccataacccactgttccaggtgatgttcaatcaccaggaccgcctgcgcgccgcgccgctgcagttgcctggcctggacctgcaagcggtggattgggcagggcacagcactcagttcgacttgaatctcgagactgaggagtccgctgctggcctatgggcctctctgacctacgccaccgacctgttcgacgccgctaccctggatcgcctggccgagcattggcaaaacctgatgcacgcggtggtgcaggatgcgtcccaaaccattgatgaactgacgatgctcagcgtgccgcaatggcagcagatggtcgaaacgtggaacgacagcgctgtcgactacccccgcgaacgctgcgtgcaccaattgttcgaagcccaggccgtggcacagccgcaagcccttgcggtgcaattcaatggccaagccctgaactacggcgaactcaaccgccgcgccaaccgcctggcccatcgcctgatcgcggcgggtgtggggccggacgtattggtggcggtgcatgtcgagcgctccctggacatggtggtcggcctgctggcgacgctcaaggccggtggcgcttatgtgccattggacccgcaattcccggcggatcgcctggctttcatgctcgacgacagccgcgcacaggtcctgctgacccagccacacttgatcggtcacctggcgcacccgcagggtgtgcaggtattgatggtcgacgccgccgacgctgccgagcacaacccgcaggtcgaggtcacgccggaacacctggcctatgtgatctatacctctggttccaccggcaagcccaagggtgtgatggtacgccaccgggcgctgtgcagctttacctgcggcatggccgataccctggacatcggcattgacgcacggatgttgtcactgaccaccttctcgttcgacatcttcgccctggagctgtacgtcccgttgaccgtcggcgccaccgtattgctgagcggccaggaactggccctcgacccggaagcgatcatcgacctggtccacagccaatcggccaacgtgctgcaagccacgccgtcaacctggcgcatgctgctggaaagcccacgctcccagctgctgcacggtatcaagagcctgtgcggcggcgaagcgctgccggcggacctggcccagcgcatgctcgacctgcaaggcccgctgtggaacctttatggtcccaccgagaccaccatctggtcggcggcccatcgtctgcatgacgcacaaccatttgtcgggcggcctatcgccaacaccacgttgtttatcctcaatgccgggttgacaccgagcccggtgggcgctgccggtgaactgctgatcggcggtgtcggcctggcccgtggttaccacgagcgccccgcgctgacggccgagcgctttgtgcccaacccgtatggtgcgccaggagaacgcctgtaccgcactggcgacctggcccgctaccgtgccgatggcgtggtggaatacatcggccgcgtcgaccatcaggtcaaggtgcgtggcttccgcatcgaactcggtgaaatcgaagcctgcctgcgcgagcatgccggcgtgcgcgaggccgtggtcctggccgataacgaccgcttgatcgcttacctggtcagctcggtacccgacacggtagaagcctacaaggcggccctgcgcgagcgcctgccggactacatggtgccggcgcacctggtgttcctcgacagcctgcccctgacccccaacggcaagctcgaccgtaaggctttgcctgcggtggacgcggcacagttgagcaatggccatgtggcgccagtgacactgcgtgagcagcaggtcgcggcgatctgggccgaggtgctggagctgccgcaggtcggccttgacgatcacttcttcgagctcggcgggcattcgctgctggccacccgtgttgtctcgcgggttcgccaggtgctggcactggaagtggcactcaagaccctgttcgaacacccgcggttggaggatttcgttcaggcgctgggcgaggagggcgtggttgcacccgcgttgctcaaggctgaccgcaatcaaccgctgccgttgtcctatgcccaggagcgccaatggttcctctggcaactggacccgcaaagcacggcgtatcacatccccagcgcattacgtttgaaagggctgctcgacctgcctgctctgcaatgcagtttcgacaccttgctggcacgccatgaaagcctgcgcacccatgtgcgccaggacgctggcggcgcggtacaggtgattgaagactcgggcctgatcgagatcagcctgcttgacaccgaggaagatggcctgaaagcgcgggtcgcagaagtggttgcgcagccattcgacctgctgcgcgggccgctgttgcgggcccagttgctgcgcctggctgttgatgaccacgtactggtgctggtgcagcaccacatcgtctccgatggctggtcgatgcaattgatggtcgaggaactggtgcagttgtacgccaccttcaaccagggccggatgcccgacttgccagccttgccgatccagtacgccgattacgccctgtggcagcgcaactggatggaagccggtgagaaggcccgtcaactggcgtactggcaggctcagctgggtggcgtacagccggtgctggagctgcctttcgactacttgcgcccggcagtacaaagccagcgtggcgcgcgcctgggcattgagttgcaacctctgctgctgagcggtctgcgtcagttggcgcagagcgtcggagtcaccttgccgatggtactgctggcgtcctaccaggcgctgctgcaccgctacagcggccaggaagacgtgcgcgtcggcgtgccgattgccaaccgcaatcgcctggaaaccgaagggctgatcggcttcttcgtcaacacccaggtgctcaaggctgatatccatgggcagatgagtgtggtgcaactgttgcggcaggtgcgccagcgttccctggaagcacaggcccatcaggacctgccgttcgagcaactggtcgaagccttgcagcccgagcgcagcatgagcctgagcccgctgttccaagtgctgttcaaccatcgcgtgacctcggccgccaatcatttgcagcggctcgccgaactggatgtcgaggtgctgagctgggatgaaggtgtggcgcagttcgacctggcgctggatgtggaggaaagccaggcgacgctgcgtgcgtccctgagttatgccaccgacctgttcgccccggcgaccatcgaacgaatggccggccactggcagaacctgttgcaggcgatggtcgccgatcaacagcaacccatcagccaactgaacctgttgggcgaggacgagcgacagcacatcctgcaattgtggaacgagaccgacgcgggcttctcggccgagcgtctggttcaccaattggtggccgaccgcgcccgggaaaacccggatgcagtcgccgttaaattcgacgcgcaaaccctgacctacggtgaactggacagccaggccaaccgcctggcccatgcgctgatcgcccgtggcgtcggcccggaagtgcgcgtggcgattgccatgccgcgcagtgccgaaatcatggtggcgttcctggcggtgatgaaggccggtggcgtttatgtgccgctggacgtggaatacccgcgtgatcgcctgctgtacatgatgcaggacagccgtgcccagttgctgctgagccacagcagtgccttgcagcaactgccgattccagatggcctggacagcctggcgattgatcgcaccgaggagtgggtaggcttcagcgacactgaccctcaagtgaagctggacggtgacaacctggcctacgtgatctacacctccggctccaccggcctgcccaagggcgtggcggtatcccacggtccactggtagcccatatcatcgccaccggcgagcgttatgaaacctcgcccgccgattgcgaactgcacttcatgtcgttcgccttcgacggctcccatgaaggctggatgcacccgctgatcaacggcgccagtgtgttgatccgcgatgacaacttgtggctgccggaatacacctaccagcaaatgcaccgccacaacgtgaccatggcggtgttcccaccggtttatctgcaacagttggccgaacatgccgagcgtgacggcaacccgccgaaggttcgtgtgtactgcttcggtggtgatgccgtagcccaagccagctacgacctggcctggcgcgcactcaagccgacctatctgttcaacggctacggcccgacggaaacggtggtcacgccattgctgtggaaagcgcgcaagggcgacccatgcggcgcggtctacgccccgattggcacattgctgggcaatcgcaatggctacgtgctggactcgcaactcaacctgcaacccatcggcgtagccggcgagttgtacctgggcggcgagggtgtggcgcggggttacctggaacgcccggcactgactgccgaacgcttcgtgccggacccgttcggcaaacccggcagccgtgcctaccgcagcggcgacctgacccgtggccgcccggatggcgtggtggattacctggggcgtgtcgaccatcaggtgaagatccgaggtttccgtatcgagctgggcgaaatcgaagcacgcctgcgagagcaggacaacgtcggcgaaaccgtggtggtggcccaggacggtccgaccggcaagcagttggtggcttatgtagtgcccgcagacggcagcctgattaacgaaaccgagttgcgcgacaccctgcgtcgcgccctgaagacccgcctgccggactacatggtgccgacgcatttcatgttcctggcacagatgccgctgacccccaacggcaagctcgaccgcaagggcctgcccgagccggatgcgagcctgttgcagcaggcctatgtggctcccgaaaccgagcttgagcagcagatcgccgtgatctgggccgatgtgctgcgcctgccgcaagtgggcctgaacgacaacttcttcgaggtcggcggccattccctgttggcgatccagatcacctcgcgggtccaggccgagctgggcctggaagtgccgctggtggaagtgttccagaccgaaacgctgcgtgcctacgtgcaggccgccgccaccttccgcgccggcagcgcggaagattttgatgatcttcgtgactttttgagcgaactagaggcgatttgacccatgctttccaaccctaatatcgatctggtttcgcgctttcttcgcttgcctctggaacagcgccagcagttttacctgcgcctgcaaagccggggcatgagcttcgctcaattgccaatcgcgtcgatccgcgaggacggccagcacctgccgctgtcctacgcccaggaacgccagtggtttctctggcagttggacccggacagcgacgcctaccacgtccccggcgccctgcgtctgagcggccagctggacaaggctgccctgcaacgcagtttcgacacgctggtggcccgccacgcaagcctgcgcacgcgcctgcacctgaacggtgagcagcgtgcccaggaagtactggagcatggggtgatcgagatcgccgagcatgccgtcgacgaaacacagctcaaggcatgggtcgaggccgagatcgccggtccgttcgacctgcagcacggcccgttgctgcgggtcagcttgctcgccgtgagcgaagcggaacacgtgctggtgctggtgcagcaccatatcgtctccgatggctggtcgatgggcgtgatggtgcaggagttgatgcagctctatgccgcctacagccagggccaggactgcgcgttggcgccgttgccgatccagtacgccgactatgccctgtggcagcgcagttggatggaggcgggggagaaggcgcgccaactggaatattggcgtgaattgctcagcggcacgcaaccggtactggaattgccgttcgaccagccgcgccccgcgcaacagagcttccgcggggcgcgccaggacatcacgctggagccggcactggtcgccgggttgaaggcgctggcccagcgggaaggcgtgacgatgttcatgctgctgttggcctcgttccaggcatttttgttccgctacagcggccagccggatattcgtgtcggtgtgccgattgccaaccgcaaccgcgtcgagaccgaatcgctgattggctttttcgtcaacacccaggtgctcaaggccgacctcgatggccagataagctttgcccaattgctgcaacacaccaagcgccgcgcgctggaagcccaggcccatcaggacttgccctttgaacagttggtagaagcgctgcaaccggagcgcagcctgagccataacccgctgttccaggtgatgttcaaccatcaggcccattctccggccgtggcacagcagctaccggggctgcgcgtggccaacctggaatgggacagtcacagtgcccagttcgacctgagcctggacacccaggagagcggcgacgggatctgggcgtccctgacctacgccaccgacctgttcggcgccgccaccgtagcgcgtatggccgagcactggctgagcctgctgcgtgccgccgtggcagacaccgcgttgccgttgcaggacctggcgaccctcaacgcccaagagcgcgagcagatcctcgtcgagtggaacgccaccgagcgcgactacccgcaagggcagtgggtgcatcagttgatcgaagcccaggcgctggcgcagccggatgcgccggcgttgcgcttcaacgatatcgccctgagttatgccgaactcaaccgccgtgccaaccgcctggcgcatcgcctgatcgaagctggggtaggtccggacgtgctggtgggcctggcggtagaacgctccatcgacatggtggtgggcttgctcgcggtgctcaaggctggtggtgcctatgtgccgctggaccctgagtacccgcgtgagcgcctggcctacatgctggacgacagtggcgtgaaactgctgctgacccaggcgcatttgcgtgaacagttgccgattcctcaggggctggaaaccctggtgctgggcgagtctgtattcgagcactacagcgacgccaacccaggcatcacgctggacggcgaaaacctcgcctacgtgatctatacctcgggctccaccggtcaaccgaaaggggcgggcaaccgtcattcggcgttgctcaaccgcctgcaatggatgcaggaagcctatggcctggaggtcagcgatacggtgctgcaaaagacgccgttcagcttcgacgtatcggtgtgggagttcttctggcctttgatgaccggtgcgcgcctggtggtggcagcgccgggggatcatcgggatccggccaggctgatcaacctgatcaatcagcagcaggtcaccacgctgcactttgtgccgtcgatgctgcaggcgttccttcaggacccggcggtgtccacctgccaaagcctgcaacgcatcgtgtgcagcggcgaagccttgccggtggatgcccagcagcaagtcttcgccaagctgccgcaagccgggctctacaacctgtacggcccgaccgaggctgccatcgacgtgacccactggacctgcgtcgacgaaggccgtgacgccgtaccgattggccgtccgattgccaaccttggttgctacatcctcgacagcaatttcgaaccggtgccggtcggcgtgctcggcgagctgtacttgggcggcatcggcctggcccgtggttaccaccgtcgtccttccctgactgccgagcgttttatcgcgcatccgtttgtcaaaggcgaacgcctgtaccgtaccggagacctggcgcgttatcgcgcagacggcgtgatcgaatacgccgggcgcatcgaccaccaagtcaagctgcgcggtctgcgtatcgaactgggtgaaatcgaagcgcgcctgctggaacacgaatgggtccgcgaaaccgccgtgctggcggtggagggcaaatgcctggtgggctacctggtgctgcaaaacgccggcgatgactggcgcgatgtgctggccgcccacttgggccagcacctgccggactacatggtcccggcccaatgggtgctgctggaacagatgccgctgagccccaacggcaagctggaccgcaaggccctgcccaagcccgcatccacccagcactacgaagcgccgcagagtgcgctggagcagcagatcgcagcgatctgggccgaggtgctcggcgtcgagcaagtcggcttgaacgacaacttctttgagcgcggcggtgactcgatcatctccattcaagtggtcagccgtgcccgtgccgccggtatccacttcaccgccaaggcgctgttccagcaccagacggtgcgcagcctggcccgcgtggcgcaattacagaccgcgcaagtgatcgaccagggcccggtgcagggcgcgactccgttgctgccgttccagcaactgttcttcgagatggacttgccggaccgccatcactggaaccagtccttgctgctgacgccgcgccagccgctgcttgccgagccactggagacggcgttgcaggcactcacccagcaccacgatgtgctgcgcctgagcttcaccccacaggccgaaggctggaccgcacgccacgacgcgccagctgccaccctgctttggcaggccagcgtggaggatgcggccgaactgcatgccctgtgcgagcgcgcccagcgcagcctcgacctgcaacaaggccaactgctgcgtgcagtgctcgccgagatggccgacggttcccagcgcctgttgctagtcatgcatcatctggtagtggacggcgtgtcctggcgcgtgttcctcgaggacctgcaaagcctgtatcgccagcggcgcttgccggccaagacttcgtcgttcaaagcctgggccgagcgtttgcaggcccatgcccgcagcgaagcggtcgcgccggaaaaagccttctggcggcaacagctccagggcgtgtcgaccgacttgccctgccgcgatccgcagggcgcgcgtcccgggcgcctggcccagaccgtggtcagccaactggatgccgagcgcacccggcaactgctgcaacaggcgcccacggcctaccgcacccaaatcaacgacctgctgctgaccgccctggcacgtgtcatctgccagtggaccgggcaggcttcgagcctgatccaactggaaggccatggccgcgaagacctgttcgacgacatcgacctgactcgcaccctgggctggttcaccagcctgttcccggtgcgccttaccccggccgactccctggcgacctcgatcaagcagatcaaggaacaactgcgcgccgtgccggacaagggcctgggcttcggtgcgctgcgctacctgggcgacgacgccacgcgccaggtgttcggccagttgccggtgccgcgcattaccttcaactacctgggccagatcgatggcagctttgatcagccggacgctttgttcgtaccggcggcggagagcaccggtgccgagcagagcccggaggcaccgctgggtaactggttgacgttgaacggccaggtatacggcggcgagctgcacatgggctggaccttcagcccgctgatgttcgaccctgcgcagatcgaagccttgagccaggcgtttacccgtgaactgactgcattggtcgagcattgctgcgcgcctggcaaccacggcgtgaccgtctctgacttcccgttgtcgcgcctcacccagccgcagctggaatccctgccgctggccgccgatgccatcgaagacctctacaccctgtcgcccatgcagcagggcatgctgttccacaccctctacgagcaagcagccggcgactacatcaaccagatccgcgtgaccgccgagggcctggatgtggcgcggttccagcaggcctgggacgccacggtgcaagcccatgacgtgttgcgcagcggcttcttctgggaaggccagctggaatggccgtgccaggtggtgtaccgcgaagcccgactgccgattgaacacctcgactggcgcgccatgccagaacgcgaactggaattgcacaacctgcagcaagcccagcgccgccagggctttgacctggccaaggcgccgctggtgcgcctggtactggtacgcaccgacgagcaacgccatgagctgatctacacgaaccatcacatcctgatggacggctggagcaactcgcgcctgttcggcgaagtgctgcaacgctacgctggcgtggcggtgccgccagcggcggggcgctatcgcgactacatcggctggttgcagcagcgtgatgccgctgccaccgaaaccttctggcgcgaacagttgggcacgctgcaagcacccactcgcctgggcagcagccagccgctggcggcagacgggcacggcgagcacccactgagcctggatcgcgctcagactgaacgtctcgaggcctttgcacgccacaacaaagtgacgctcaacacgcttatccaggccgcatggctgatcctgttgcagcgccatagcgggcagtcggtggtggccttcggcgccacggtggccgggcgcccggcggagcttgtgggggtggagcagcagatcgggctgttcatcaacaccttgccagtgatcagcgccgtagatgaccagcagagcgtggcggcctggttgcaagcggtacaggaccgcaacctggccctgcgcgagcatgaacacaccgggctgtacgacattcagcgctgggccgggcagggcggtgaagccctgttcgacaatatcctggtgttcgagaactacccggtgtccaaggccctggaacaaaacggtggcagcggtatccgttttggcctgccggaatcccgcgaacagaccaacttcccgctgacggtgctggtggacgtcggcgatacgttgtcggtgcagttcagctttgcgcgtgcgcatttcgatgcaagcacggtacacacctatggacgtcacctggtcaatctgctgcacgccatgcttgagggtggccagcaacgtctgggcgacctggcgatgctcgatacggctgaacgtcagcaggtgcttcaggattggaacgccacggcgcgggactacccgttgcagcagggcgtgcatcagttgatcgaagaacaggtggcgcgcacgccgcatgccgcggcgctggtgtttgccgggcagcgcttgagctatatcgaactgaaccgtcgcgccaaccgcttggcccatcgcctgatggaagccggggtaggcccggacgtgctggtgggcctggccgtggagcgctccattgaaatggtggtgggcctgctggcggtgctcaaggccggtggcgcctatgtgccgctcgacccggaatacccgcgtgagcgcctggcctacatgctggacgacagtggcgtgaaactgctgctgactcaggcgcacttgcgtgaacagttgccgatccctcaggggctggaaaccctggtgctgggtgagtcgacctttgaagcctacagcgacgccaacccaggcatcgcgctggatggcgaaaacctcgcctacgtgatctacacctcgggttccaccggccaacccaaaggcgccggtaaccggcattcagccctggccaaccgtctgcactggatgcaggaagcctatgggctggaggtcagcgataccgtgctgcaaaagaccccgttcagcttcgacgtatcggtgtgggagttcttctggccgctgatgaccggcgcgcgcctggtggtggcagcgccgggcgatcaccgcgatccggccaggctgatcaacctgatcaatcaagagcaggtcaccacgctgcactttgtaccgtcgatgctgcaggcgttcctgcaagacccgaaggtcgcaacctgccacaccttgcatcgcattgtttgcagcggtgaagccttgccggtggatgcccagcagcaagtcttcgccaagctgccgcaagccgggctctacaacttgtacggcccgaccgaagccgccatcgacgtgacccattggacctgcgtcgatgaaggccgcgatgccgtgccgattggacgcccgattgccaacctcggatgctacctcctcgacagcaacttcgagccggtgccggtgggtgtgttgggcgagctgtacctcggtgggattggtctggcccgtggttaccaccgccgcccggcgctgaccgccgaacgttttgtcgcccatcccttcatcaagggcgagcgcctgtaccgcaccggtgacctggcccgctatcgccctgacggcgtgatcgaatacgccgggcgcatcgaccatcaggtcaaactgcgcggcctgcgcatcgagctgggtgaaatcgaagcgcgcctgctggaacacgattgggtccgtgaaaccgccgtactggcggtggacggcaagcacttggtgggctacctggtgttgcaagacgccggcgacgattggcgcgatgtgctgagcgctcacctggcgcaacagctgccggactacatggtgccggcccagtggatgctgctggagcagatgcccctgagccccaacggcaagctggaccgcaaagcgctgccgaaggtcgacgccaacctgcaagcccgcgaatacctggccccgcacagcgaactggaacaacagattgccgcgatctgggccgaggtgctggacgttgagcgtgtggggctaaacgacaacttcttcgaactgggcgggcattccctgctggccacccaggtggtggtgcgcctgcgcgagcaattgcacgcggagttcgacgtcaaatcgatcttcaccaccccgaccctggccgatttcagtgcctatgtggcggcccggcagacaaataattcgccggtgcaggacgcattggctaaatccttggaggccctcaaacgtctatcagcagaagatttggataaattgatttcctgaggggcgtggcgtgcaagcattaatcgagtcggtagggtcactttcggcgcaacagaagaaagcgttggcggtaatgctcaagcagcaaggcatcaacctgtttgagatagccccggttttcaagcgtcaggacggtgagcctcttcgactctcttatgcccaggagcggcaatggtttctgtggcaactggagccgcagagcaccgcttatcacgtgcccagggccctgcgcctgagcgggcccttggacgtggccgcattgcagcgcagctttgacacgctgatgatgcgtcatgaaagcctgcgcacgcatttgcaggaggacggcgacagtgccttgcaggtgattgccgagcaggcgcgggtgcagatcgccgtggtcgacgcccgggagtcgcagctcaaggacctggtggaagcgcaaattgcccagccgtttgacttgcagcaaggcccgctgttgcgagtcaagctgctgcgcctggcgcctgaggaacatgtgctggtgctggtccagcatcacatcgtgtctgatggctggtcgatgcaggtgatggtcgacgagctggtccagctctacgcggcccatgtgcagggccaggacctgcaattgccggccttgccgattcaatatgccgactatgcgctgtggcaacgcagctggatggaggcgggggagcgtgaacgccaactgggctactggaccggcatgctcggtggcgagcaaccggtactggaaatgccgatggaccgaccgcgaccggcggtgcagagctaccggggtgcacggctcgacctgacgctcgaagcgtcgctggtggcgggcctcaagcgcctggcgcagcgcgaaggcgtgacggtgttcatgttgttgctggcgtcgttccaggccgtgttgcatcgctacagcggccagggtgatatccgcatcggcgtgccggtggccaaccgtaaccgggtggaaaccgagcgcctgatcggctttttcgtcaatacgcagattctcaaggccgatatcgacggccagatgaccttccatgaactgctgcaacaaacccgccagcgctcggtagaagcccaggcgcatcaagacttgccctttgagcaactggtggaagcgctgcagccggaacgcagcctgagctacaacccgttgttccaggtgatgttcaaccaccagaccgatacccagcgcagcggcggcagcgtcaccggcctgcacgtgcaggggctggaatgggagagcaagaccgcgcagttcgacctcaacctcgacacccaggaatcggctgagggcatccaggcgtcgttgacctacgccactgacctgtttgacgcgccgggccttgagcgcttgctcgcgcactggcaccgtttgttgcaacaggtggtgcaggattgcaacgtccgcgtcggcgagctgccgttgctggacgatgcgcaatggcagcaactggtgcacacctggaacaacacgcatcaggtgttcccccaggatgtcggggtgcaccgcctgctggaagcccaggcacaggcccgtccggacgcgacagcgctggtctgcaacggccagtctttgagctacgcagaactgaacctgcgcgccaaccgcctggcccatcgcctgcgcgcggccggtgtcggcccggatgtgctggtggccgtggcgctggagcgttcggtggacatggtgctggccttgctggccacgctcaaggcgggcggcgcctatgtgccgctcgacccgcagtttccggccgaccgcctggcgttcatgctcgaagacagccgcgcacgtgtgctgttgaccgccggtgacctgcacgagcgcctgccgctggcagccgatcaacaggtgctgttcatcagtgaacaggaggacgcccgttacagcagtgacaacccgcaggtcgcgctgaccgatgagcacctggcgtatgtgatctacacctccggctccaccggcaagcccaagggtgtgatggtgcgccatggcgccctgagcagctttacccagggcatggccgacacgttgagcatcgacgccaaggcgcggttgctgtcgttgaccaccttctccttcgatattttcgcccttgaactttatgtccccctggcggtgggcggcacggtcgtggtggcggacaagcctgtttcccaggaccccgaagccatcctgagcctgctgcatgaacaggcgatcacggtcgtgcaagccacgccctcgacctggcgcatgctgctcgacagcgagcgccgtgccgtgctgcacgggatcaagtgcctgtgcggcggcgaagcgctgccggccgacctggccgagcgcatgctggcccagcagggcacggtgtggaacctgtacggcccgacggaaaccaccatctggtcggcggcccacccattggttgaaccgttgccgtttgtcggtcgcccaattgccaacacatcgctgtttatcctcaatgccgaactcgctccgacaccggtcggcgtcagcggcgaactgctgatcggcggtgtcggcctggcccggggttatcacggtcgtgctgcgctgaccgccgagcgcttcgtacccaacccctttgcacacaacggtgagcggctgtaccgcaccggcgacctggcgcgttatcgcgtggatggtgtggtcgagtacatcggccgcgtcgaccatcaggtcaaggtgcgcgggttccgtatcgagttgggggaaattgaggcgtgcctgcgtgagcagagcgctgtccgtgaagcggtggtggtggccgagaatgaccagctcctggcgtatctggtgacgcacgccgtgacatcggaaaccgatcagggcaccctgcgcgagacgttcaagaccgcgctgcgcgcggtgttgccggactatatggtgccggcgcatatgctgttcctggcgcgcctgccgttgacgcccaacggcaagctggaccgcaaggcgctgccgaagccggacgccagcctgctgcaaaaacgctatgtggcaccggtcggcgagaaggcgcaacaagtggccgcgatctgggccgaagtgttgggggtgccacaggttggccttgaagatcatttcttcgagctgggcggtcactccttgctggcgacacgtgtcgtgtcgcgggtacgccaggcattggcgatcgacgtagcgctcaagagcctgtttgaacaaccggttttgggggcgtttgtacaggcgctgggtgaaaagggcgccgatgttgcgcacattagcttggctgaccgcgaacaacccttgctgctttcctatgctcaagagcgccagtggttcctctggcagcttgaaccggacagtgcggcttatcacattccggccgcgttgcgcctggtgggtgcgctggatcgcaacgccctgcaaagggccttcgatactctggtgcagcgccatgaaacgctgcgtacggtgttttttgccgatacgcaccagactgtccagcgtgtgatcgagcaagtcgcgccggtcatcgactatcaagtgcttggctcgactgagccggcccggttgcaggcgatggtagaagacgaaatcgccaggccattcgacctgcagtccgggccattgctgcgcatcaagctgctgcaactgagcgaacgcgagcatgtgttggtcatggtgcagcaccatatcgtctcggatgcctggtcgatgcaagtgatggtcgatgagctggtgagcttgtatgcaggctacagccagggccttgagcccacccttgcaccgttgccgattcagtacgccgactatgcccagtggcagcgcagctggatggaggcgggtgaaaaggagcgccagctggcctactggcgtgcgcgcctgggagatgtgcaaccggtgctggagttgccgctggatcggccgcgtccggccatgcagaactatcagggggcacgcctggacctggtgctggagtcgtcggtggtcgagggcttgcgcgcccttgcacagcgcgaaggcgtgacgatgttcatgctgttgctagcgtccttccaggcactgttgtaccgctacaccggccagtcggacatccgcgttggcgtgccgatcgccaaccgcaaccgtctggaaaccgagcagttgatcggctttttcgtcaatacccaggtgctcaaggccgagattgacgggcacatgacctttgcccaactgctgcaacaggtcaaggaacaggcgctgggcgcgcaggcccaccaggacctgccattcgagcagttggtcgaagccttgcaacctgagcgcagcctgagccacaacccgttgttccaggtaatgttcaaccaccagtcggctgcgcaagcccatcgcgatggccagcaactacctggcctgcgtgtggaagggttgacgtgggacagtcacacggcgcatttcggcctgagcctggacaccgaagagtctggtgaggggctgctggcttcgctgacttacgccaccgcactgttcgacgcgagcaccctgcagcgcttcgccgcccattggcagaacttgctcaagcgtgtggcgggcaatgcccagcagtgtgtcgccgacttgccgatcctgggcagagatgaacaagcgcagatgctgtacgcgtggaacccgccgcaaccgtcgcgtgccgcccatggcagcgtgctgcaaaagttcgaacaacaggtggccagccagccccaggctatcgccttgatcatggatcagcggcgcatgacctacgccgacctcaacctgcgggccaaccgcttggcccatgcactgatcgagcagggcgtgggcgccgacagcctggtcggcgtggccgtggaccgttcgctggagatgatcgttgcgctgttggcggtgctcaaggccggtggcgcctatgtcccgctggacccgcaatacccccaggaccgcctgcaatgcatgatcgaagacagcggcctgcaactgttgctgacccagcagccgctgctggagcgcttgccgatcagccctggcctgacgttgatttgcctggaagagggtgcggactggctggccgagtacccgggcagcaatcctgagatacgggcgttccccgcgaacctggcgtacctgatgttcacctccggctccaccgggcggcccaagggcgtcggtatcgatcaggcctcactggcacggcatgtcgaggtgtttatcgagctgttcgaactgactgcggctgaccgtgtgttgcagttcggtacgttcaacttcgacgggtttgtcgaacagctgtatccggcgctgtgctgcggtgccgccgtggtggtgcgcggcggtgagttgtgggacagcgacaccttctatgcgcaactgatcgaacatgacatttcggtggttgacctgaccaccgcctattggcacctgatcgctcgtgactttgccgagcgcggtgtgcgcgattacggccgcctgcgccaggtgcatgccggtggtgaggcgatgccaccggaagggctggcctcctggcgtgatgccgggctgggccacgtgcgcctgctcaacacctacggccccaccgaagcgaccgtcacggtgaccgctctggattgcgccggttacgtggagggtcgcgagaccgttacgcagatgatgccgattggtcgcgtgctggacggccgtgcgatttacctgttggatgccggcctgaacccggtgcccgtgggcgtggcgggtgaattggtgatcggcgggccgctgctggcacggggttacttcaaccgcgccgcgctgaccgccgaacggtttatccccgaccccttcgacccgctcgggggagggcgtctgtaccgtaccggcgacctggcccgttaccgcgccgatggcgtgatcgagtatatcggtcgcatcgaccaccaggtcaaggtacgtggcttccgtatcgagctgggcgagatcgaatcgcgcctgctggcacaggacgacgtgcgcgaagcgttggtgatcgctgccgaccagcaactgatcgcctacctcgtcaccccattgacggaagccgagcagcctggcttgcgtgagcgtattcgtggcgtgttgcgcgatgagctaccggactacatggtgccggcacatttcatgtttctggagcgcctgccgctgagccccaacggcaagctggaccggcatgccctgccgcgcccggaagcgactcaggcgactgagcagtgggtggcccccatcagtgcgctggagcagcaggtcgcggcgatctgggcagatattctcggcgccgagcgtatcggtttgaacgaccatttctttgaactcggcgggcattcgttgctggccatgcaagtggcttcacgcctgcggcataacctggggatcgagttacccttgcgtgtgctgttcgaacaaccgcgcctgcaggggtttgtggccgcgctgcacaccgagggcaagcgcggcggttcgacggcgccggcgttggttcccgcgtctcgcgagctgccgttggtgttgtcctacgcccaggaacgccagtggttcctctggttgctcgaccccgagagcactgcctaccacgtgcccagcgctttgcgcctcaagggccgtttggacctgaacgcgctgcagcgcagtttcgatgcgttggtggcgcgccatgaaagcctgcgtacccatctgcatcagggcgatgagcagaccgtgcaggtgatcctgccgcaggcgcgtgtcgagattgcattgcgtcagagcgatgaagcgcaggtcaaggcgcaggtcgaagccgagatcgcccggccgttcgacctgcaagcggggccgttgctgcgggctacgctgttgcgcctgagcgacgacgagcatgtgttggtgctggtccagcaccatatcgtctcggacggttggtcgatgcagatcatggtcgatgaactggtgcaactgtacagcgcctacagtcagggcctggaggtgcagttgccggccttgccgatccagtacgctgattacgcccgttggcagcgcgagtggatggacgccggcgagaaggaccggcaactgggctactggcaggcgttgctcggtggcgagcaaccggtgctcgaactgccgttcgaccaccagcgcccggctgagcaaagccatcgcggtgcgcgcctgtttgtagaattgccgccggccttggtcgccgacctcaaaggcctggcacagcgcgaaggcgtgacgatgttcatgctgttgctggcctcgttccaggcgttgatgcatcgctacagcggccaggaagacgtgcgcgtgggcgtgcctattgccaaccgcaaccgagttgaaaccgagcggttgctgggctttttcgtcaatacccaggtgctcaaggccgatatcgacgagcagacctcagtgctgcaactgttgcagcaggcccgccgccgtgcgctggaagcccaggaccatcaggatctgccgttcgagcaactggtggaggcactgcaacccgagcgcagcctgagcctcaacccgctgttccaggtgatgttcaaccatcaaaccgaagcacgtctgggcgcaaccgagcatcaactgtccaccttgcgtgtcgaaggcatggaatgggcaagccagaccgcgcacttcgacctggacctggacgtgcatgaaggcactgacggtatctgggccaccctgggttatgccaccgatctgttcaatgcctccaccatcgagcgcatggcgcggcattggcagaacctgctgcaagcgatggttgccgaccaacagcaacccatcagccaactgaacctgttgggcgaggacgagcgacggcacatcctgcagctgtggaaccagaccgatgccggcttctcggccgagcgcctggtgcacgagcgagtggccgaccgggcccgcgaaacccccgatgccgtggcagtgaagttcgacgcacagaccctgacctacggcgaactggacagccaggccaaccgcctggcccatgcgctgatcgcccgtggcgtcggcccggaagtgcgcgtggcgattgccatgccgcgcagtgccgaaatcatggtggcgttccttgctgtgatgaaagccggtggcgtctacgtgccgctggatatcgaatacccgcgagatcgcctgctgtacatgatgcaggacagccgtgcccagttgctgctgacccacaccagcgcgttgcaacaactgcctattcccgagggtctggacagcctggcgattgatcgcaccgaggaatggtccggttacagcgacacggcgcctgatgtgaaactggacggcgacaacctggcctacgtgatctacacctccggctccaccggcctgcccaagggcgtggcggtatcccacggtccgctggtggctcacatcatcgccaccggcgagcgttatgaaacctcgcccgccgattgcgaactacacttcatgtcgtttgccttcgacggctcccatgaaggctggatgcacccgttgatcaacggtgccagcgtgctgatccgcgatgacagcctgtggctgccggaatacacctaccagcaaatgcatcgccacaacgtgaccatggcggtgttcccgccggtttatctgcagcagttggccgagcatgccgagcgtgacggcaacccgccgaaggtgcgcgtgtactgcttcggtggcgatgccgtagcccaagccagctacgacctggcctggcgcgcactcaagccgacctatctgttcaacggctacggcccgacggaaacggtggtcacgccactgctgtggaaagcgcgcaagggcgacccatgcggcgcggtctacgccccgattggcacattgctgggcaatcgcaatggctacgtgctggactcgcaactcaacctgcaacctatcggcgtggctggcgagttgtacctgggcggcgaaggcgtggcccgtgggtatctggaacgtccggcactgaccgccgaacgcttcgtgccggacccgtttggcaaacctggcagccgtgcctaccgcagcggcgacctgacccgtggccgcccggatggcgtggtggattacctggggcgcgtcgaccatcaggtgaagatccgaggcttccgtatcgagctgggcgaaatcgaagcgcgtctgcgcgaacaggacaacgtcggtgaaaccgtcgtagtcgcccaggacggcccggccggcaagcagttggtagcttatgtggtgcccgcagatgccagcctggccaacgaagccgagttgcgcgaaaccttgcgccgcgccttgaaaacccgtctaccggactacatggtgccggcgtacttcatgttcctggcgcaaatgccgctgacccctaacggcaagctggaccgcaagggcctgccgcagccggacgccagcctgttgcaacaggcctacgtggcaccgcagagcgagttggaacaacaactcgcggcgatctgggccgacgtgctgcgcttgccgcaagtgggcctgaacgataacttcttcgagctgggcggtgattcaatcatctcaatccaggtggtgagccgtgcgcggcaggccggaatccgctttacgcccaaggacctgttccagcaccagaccgtacaaagcctggccggtgtggcacgccagggggacgacgggttgacgattgatcaggcggccttgagtggcgaaacgttgctgctgccgatccagcaggctttctttgccgatgagattgccgagcgtcaccactggaatcagtcggtggtgctcaaagcccatgagccccttgacgctggcctgcttacccaggccttgcaggcgctgatcgtgcatcacgatgcgctgcgttcccggtttgtcgagggcacggacggctggcagggtatgtatcgcgccgccgagcaccaccaggccgatgccgtgctgtggcaaagcgtgctgcacgatatcgaagagctggctgttttgggtgaggaggcgcaacgcagcctcgacctcgaccagggcccgttgatgcgtgcggtgctggttcaattgcacgatggtacgcaacgcttgctgctggttatccaccacctggtggtggatggcgtgtcatggcggatcctccttgaggacctgcaaacggcctatcgccaactcgccagtggcgccaaggtggcgttgcccgccaagaccagttcgacccgcgactgggcgcagcggcttcagcgatatgccaaaggcgacgcactgacccgggaactggcatggtggcaagcccaattgcacggcgccgaatctgacctgccgggcgccaatccgcaggcgagcttgagcaaccggcatgccggcagtgcgatcacgcacctggacgccgctcacacgcgccgcctgttgcaggatgcacctgccgcctaccgcacccagatcaacgacctgctgctgacggcgctggcgcgggtaatcgggcgctggaccggccacgattccaccctgatccgcctcgaaggccatggccgcgaagacctgttcgaggagatcgacctgacccgcacggtcggctggttcaccagcatttacccggtcaaactcacgccggctgcaaccctggctggctcattgaaggggatcaaggaacaactgcgcgccattcccgacaagggcatcggttttggtgccttgcgctacctgggccagcccgaggtacgcgatgcattggcagacttgccgcagccgcgcattaccttcaactacctgggccagttcgatgcgagttttgatagccctgaacacgaggggctgtttgcgccgtccggtgacgctgccggcaacgatcagagcccggacgcatcgctgggcaactggttggaaatcaatggccaggtgtacggcggcgagctgaacctgaactggggattcagccagcagatgttcgatcccgcttgcatccagcagttggccgatgactacgccgaagagctcaaggcgttgatcaagcactgctgccagcccggacaggccggcgccacgccgtcggacttcccgctggcgcgcttgaaccaggcgcagttggatggcttggggttgccgttgaaccaggtcgaagacctttacccgctgtcgccgatgcaacagggcatgctgttccaatcgctgtttggccagggctcgggcgactacatcaaccaaatgcgcgttgaggtgcaaggattggatgtggcgcgtttccgcgcagcctggcaggtcgcgctggagcaccacgatatcttgcggaccggtttcctctggcagaccgagttggagcagccgttgcaagtggtgtaccggacggcgcaggtgccgtttgtcgagcacgattggcagcagcgcgcagacagtggcgaggcgtttgacgcgttggcgcataccctgcgagccgatggttttgtgctggaacaggcgcccttgctgaacctgatggtggtccgtaccggtcccgacagccaccatttgatctacaccaaccaccatatcctgatggatggctggagtgcctcgcagctgttcggcgaggtgctgcaacagtatgccggcgagtcggtgcgcgcacccagtgggcgctaccgggattacatcggttggttgcaggcccaggacccgttcaccagcgagaccttctggaaagcccagttggccggtttgcaggagcccacgcgcctttcccgtggcatcacccatgagtcgggtgtgccccaggccaatggcgttcatcacctgacgctggagcagacggcgaccgaacagctcaaggctttcgcccagcgccacaaggtgaccctcaatacgctggtgcaaagcgcctggctcttgctgttgcaacggcataccggccttgacacggtcgcgttcggcgccacggtcgcggggcgtccggccgagttggcgggtatcgagcagcaggtcgggttgttcatcaacacgctaccggtggtggccactccaagcccgcagttgagcgtcgacgcttggttgcagcaagtgcaggaacaaaacctgcgcctgcgtgaacaggagcacacgccgctgttcgagatccagcgttgggccgggcttggtggcgaggcgttgttcgacagcatcctggtgttcgagaactacccggtgtccgaagcgctggagcagggctcgccggcgggcctgcggttcggtgcgatggacagcctggaacagacccactatccactgaccgtgctgctgggcatcggtgacagcctggcggtggagttcaactacgctcacgccgccttcgacgcacaggacatcgtgcacctggcggaacatttccagcaattgctgcaagccttgacgctgccgcaggtggagcgcctggcggacttgccgtcgctgcccgccgcacagcgtcaacggatcgttgaggactggaacgcaacggcgcgtgagtacccgttgcagcgcggcgtgcatcagttgatcgaagagcaggtagccctgacaccagaagcaccggctttggtgtttggtgcacagcgcctgagctacgccgaactgaaccgtcgggccaaccgcttggcgcatcgcctgatcgaagctggggtaggtccggacgtgctggtgggcctggcggtcgagcgctccattgaaatggtggtcggcctgctcgcggtgctcaaggccggtggtgcctatgtgccgctggaccctgagtacccgcgtgaacgcctggcctacatgctggacgacagtggcgtgaaactgctgctgacccaggcgcatttgcgtgaacagttgccgattcctcaggggctggaaaccctggtgctgggcgagtctgtattcgagcactacagcgacgccaacccaggcatcacgctggacggcgaaaacctcgcctacgtgatctatacctcgggctccaccggccaacccaaaggcgccggtaaccggcattcagccctggccaaccgtctgcactggatgcaggaagcctatgggctggatgtcagcgacacggtgctgcaaaagactccattcagcttcgacgtatcggtgtgggaattcttctggccgctgatgaccggcgcgcgcctggtggtggcagcgccgggggatcatcgggatccggccaggctgatcaacctgatcaatcagcagcaggtcaccacgctgcactttgtgccgtcgatgctgcaggcgttccttcaggacccggcggtgtccacctgccaaagcctgcaacgcatcgtgtgcagcggcgaggcattgccggtggatgcccagcagcaagtcttcgccaagctaccgcaagccgggctctacaacctgtacggcccaactgaagcggccatcgacgtgacccactggacctgcgtcgatgaaggccgtgacgcggtaccgatcggcaaacccattgccaacctgggctgctacatcctcgacagcaacttcgaaccggtgccggtgggtgtgttgggcgagttgtacctcggagggatcggtctggcgcgtggttaccaccgccgtccggcactcaccgccgaacggtttgtcgcccatcccttcatcaagggggagcgcctgtaccgcaccggtgacctggcgcgctaccgcgaagacggcgtgatcgaatacgccgggcgcatcgaccatcaggtcaaactgcgcggcctgcgcatcgagctgggtgaaatcgaagcgcggctgctggagcatgcagcggtgcgtgaagcggcggtattggcggtagacggccaatacctggttggctacctggtcttgcaggagcaggatgcgcagtggcgtgaaaccctcagtgcccacctggccagccatttgccggactacatggtgccggcacaatggctgttgttggagcagatgcccctgagccccaacggtaagctggaccgcaaggcattgcctaagccggacactcagtcgacccagcgttttgaggcaccgcagaatgagctcgaacagaaaatcgccgcgatctggaccgatgtacttggcgtagagcaagttggggtgaacgacaacttcttcgagttgggtggtcattcgctgttggtattgatgctcaaggagcggattcgcaaggccagcagcatcgacctttctgtcagccagttgatgctcaacccgaccgtgcgtgcgcaagtcggttgcctgcaagggacggcacgtcgttcgctgctggtcccgctcaacggtcagaacacgggcacgcctgtctacctgttccaccccagctatggttcggtgcattgctacaaggctttggccctggcgttgcgtgagcagcggcctgtggtcggtgtgatttgtcgcgcattggccgaggagggtgcgcaagtgccgacctgggccagcatggtcgaggattacatcacgcagttactggaagctcagcccgaaggcgccttccgcctggccggctggtcgctgggcggcaacctcgcggtagaggttgcgcatggcctggagcaggcgggccggaacgtggagttcgtgggttggatcgactcggcccccccgcgttggctcactcagtattgggatgcggccgtcatcaccgatgagcgcgagatctccgataatgatcggcgcgtggccttgctcggtgtgatgttccctgcgtttgcagaggcgatccatcgcacctggcaggctttgcaagtggccgacgacacggcggatcagcaatgggcagggttcatcgaatgggctgaaaccaccttgggtgaagctttccgcgacattcagcaaacgctgttgggtggcaacgaggcacaggtttcctgggaggttgaccgcaccttgttcaagcgtatggagcaggctgacttcaagccactcaaggcgccggtgagttgctggtgggcggccatgagccgtgcgggccagcacaaggcgttgatcgaagacagtatggctcgggtgctcggccaggcggtggtgcggtcggtggagatcgatgtggaccacgaacggatcatcgacaatgccgagttcatacgcagctttgtgatggccatggagtaaccgtcgcttaaaccacaagccccggctcatgggtgtgagccggggcttttttgtggggcaaaggtgtgcacggcagaggcaccgtaccgcccataaaaaaacaccctgcgcaggtgttgcctgctcagggtgtcggggggtgccggtgtagggtcagaagtcccagcgggtcgaaaacatcacgttgcgtgggtcgccggcgtaggacgaggtgtagaacccgatgttggtgtagtagcgcttgtcgaacacgttattgacgttcaccgaggccgagaggtttttggtgatctggtagcgcgccattgcgtcaaccagccagtacgggtcttgggagaagcgctgggtcactctcttgccgcggttgtagacgtcctgccaggcctcgccctgccagcgggcgccgccgccgagggtcagtttgtcgagcgcgcccgtcagcttgtagctggtgtagaagttcagctggtcctgaggttcccaggtggagaacttcttgccgtcgtcatcgcggatcactttgtgggtgtagcccgcctgcacttgccagcccggcagcagttcacctgagatctcggcttcatagcccttggttgtggcctggacgcccttgtaggcccactcgacaggcgagttggccggcatattgttgttgtactcagtgtcttcctcggcacgattggactcatggatctcgaagtaggccaggctggcgttcaagcggccgtcgtagaactcacctttcaggccaatctcgtagttctcgccttcgtctggctcgaccatcttgttgttgcggtcgggccgcagttgttgcggcatgaagatcgaggtatagctgccgtacaccgagaaatttttgttcaggtcatacaccacacccgcatacgggatgagcttgccggtttcgcgcgaatcgttggtgccggtcaggcggtagtcggtcaggcgtgagccgagcaatacggacagatcatcggtgatgctcaggcgggtcgagaagtagacggcggcctggcgggtgatgtcgtctttttcgtgggcagggccccattgtggttcaaggctgtcaccgttccattcatagagcgggaaattgttgctgtctcgataggtcgcttcatagccgtaatagtcgttgccttcccagtgtgaacgcgacaccgaggacccgacgaccaactgatgttcgcgcccagccaggctgaacggcccggagaggtagaagtcaccgttgttgctgatggtcttgccggtgaacttggaaccatagactgcagttctgtcggtagtgcccgagatcggcgacgcataacccaatggcgcgttgtacccattgagctggttgctgtagttggccttggcgatccagccattatccagggcgtgttccagggtggcgaatacactgcggctgtattgcccccagctgctccacttcggcccgttgttgtagccacggtcgaacttgatttcattgcctacaccatcgaaaagcgagcggctgcccgaccagctcgatcctttgggatcgttgttctggtaatcggcgccaacggtcagcagggtgtccggggaaaggtcgaattcgaggatgccgtagtagacattggtcttgcgttcgtagtggtcaatgaacgaatgcttgtcctggtacgccacaacggcgcgcccgcggacattgccgctatcggtcagcgggccgctcacgtccagttcagagcggtagttgtcccatgaacccgcgcccaggcctacgtggccctggaattcggcggtcggcttcttgcgcaccaggttgatggtgccgccagggccgccggcgccggtcatcaggccggtggtgcccttgaggatttcgacgcgatcgtagatagccatgtcgctgagggtctggccagccgagtaaccctcattgcgcgtagtgggtacgccgtcatactggaaattctggatcgggaagccgcgggaatagtagttggttcgttcgctgtcgaaggtcgagacagtgatgcctggcgtgtggcgcatcacgtcgtcaataccgttcaggccgaagtcgtccatggtctggcgggtgacgacggaaatcgactgcggtgtctcacgcggcgtcagcaccatcttcgtagcggtcgcgatggtacctggcgtgtaggaaccggtgccttcggtaatggtgcccaactggttggcattgatctgggtcgcgcccagctccaaggcgccggtgccggaggcgggtgcgttgatgatcatcgagctgccctgcaggctgtagctcacgccagtaccggccagcaggcgttcgatggcctgcaccggatccatcttgccgctgacggcgctgctgtgtttgtctttgacggtgtccgggctatacaggagctgcaggttggtttgttgaccgaatacctgcaacgctgtactcaaaggttgcgccgggatgttcaattcgaactcttgcgcctgaacatagcccgccactggcaggctgaccgcaagggccagggcactggggagaacgtttaatttcaaagcccgtcgcatggagactgcggtgctcaacgggctgagggcaagccgtactggcatggattgtttctctttttagatgttagcagataggtacttaatgcggttaattctcattgctgcatatgagacgttcgcactcgcataaaccggaaaaatttatgcgggctccagttctgcaacgacttttccggcactcaaacgcaccaactggtcggcaatatcgaaatagcggtcgtcatgactgatcacgatgatcgtcttgcccaggcgcttgaggtccggcagcagttccgtgtagaagatgcggcggaaggccgggtcctggtcggcggcccattcgtcgaataccagtaccgggcgctcttccagccaggcgttgaccagggccaggcgcttgcgctgcccggtggagaggtcggtggtgctgaacacgccgtccttgacgctgaccttgtgcgcgatttccaggcgttccaggtacttggcggcgctgtccagcgactgcgtggcactgccctgtaccaggtcatcgaataggtagtagtcggcgaataccgtggtgaatagctgacggtagtcgtcgcgcgccgggtcggtcacggtttcgccgttgaggcggatttccccggcgtggggttgatacaaaccgagcaacagcttgatcagggtggtcttgccgcagccgttctcgccgacaatgaacacgatatcgccctgctggatgctcaggttgatcggccccaggtggaacggctggctgccttccaccggcggcgggctgtaggtcacgccgcgcaattccaggctgttgaccaccggcgtgggggcttcgctgccatccatgagcaagtgcggctcgggtgacgagaagcggtcggacagctcggtgatgcgcgcaaaggcaatccgcgccttgccgatgatcggcaagtagccaaccacatgctccagcgggcctttcatgtacagcagcaccagcacgaagccggtgatcactgcggggtccgggttcgggttataggcctgcatcgccagggccaggccgatgaccacgaagaacagcatcgagccgaaggtcttggcgacgatatagatgttcaccgaacgcacctggatatcgctgatgcggtcggcggtttcctggatgcggtgggtgttcatgcggtagcgacgtgggcgatggatgcgcagctccttggcaccggaagaaatcgcggagtagtagcgttgcaattcgtcttcctggtcgcgggcttcgtcgaagccacggatgcccttgtgcccggcgatgaattgcacgctgctgccaatcacgatggcaacgatcatcatcaggaacatcggcaccgacaggtacgccaggtagccaaggcaacccagggtcacggtagtcgcgatggccagcggcgtgaacgcaaaggaaaaatcactgatggtgtcgacgtcatgggtcagcaccgggatcaggcggtgagagcgaaattgctcgatctgctcgatgggcgccgaaagcaccttctcacccagttccttgcgcagtgccgcaatgatgcgttggcccacatagttggtgccgatatcggagacgatcgagctggtgagtgccagcacacacaacgccgcaaacgtcagaatcaccccctgcgtcatcccggtggacgagtgcaaggcgttgttgatggtcgccagcaacagcgtgatggccaggccgccggccatgcccagggcgacggagacggtcacgatggtgcgaaagggcctgagcaatgcgagcaaacctttgaaggcgccgcgcttggggtcggtcataaatacttcccggaaagtgaaaaaagagggggctgggcacacagacccttacccatgacaaacgaaggattggcgtgactatttagcgcggcgtgcccggcggtggcggggatggataaattaggcggggcctggttcgttcttgtggagtagccgcacgcgttttggcgcgtgcctgatttatccagcgagagcgaaacaatgacgaaaaggaatctggtgtacgtgtggtcactgcgcaatgccgccgccgacaaggcaggacagccagtggcctacaaggaccacgagcgctacatgatgtcggtgctggaatccctggcaggggccctgaacgacacgccgctgggcgaggcttataacttggtgggcgtggtatatgacgatgacgagcagaacccgcgcgaccagcaactggtccgcgactacggcttcgcctaccagccgggccgccaatggctgtacccggccgacctgcgcgtgcaggggcgcctggtcaatgacttgctgctgagcgtgccgtccacctatcggcgcctgccacggggcagcgcggaacacatcgccggcaagcaggacttcgaacgtcgcctgcacgacacgctggtggaattgaaggcggacatcgtggtgctcgacggcctgctggtgatcctcgatgagctggtgcgccctggtgcgccgtttgccggccgcatcatgaacatccaccccggtattacccgcatcgaatcgccgtacgagcgccgtggcgcctatgccacctggaacgcgctgtacggtgcgcgggggctgacggtcacggattgggcgaccaaggccaccacgccatccgagccgctgtacctcaccggtgcctcgtttcactacgtggacaacggcattgattccggtgaagtgttccacgacgtgctcaagaccgagatcgcgccggacgacaccatccttgagttgcgctggaacaacttcaacaacagcctgttcccggcgttgcatgaagggttggcgttgttggcccagaaggcaatctaaagcagccacggttaaaaatgtgggagggggcttgcccccgatggcgggagtgactgatacaccgccatcggggg

SEQ ID NO: 5 - DNA, 36605 bp, Pseudomonas nodulensis
cttgcccccgatggcgggagtgactgatacaccgccatcgggggcaagccccctcccacaaatggatttccagtgcggttagaggtcgcgcacgacgcggaacccaatccaatccccccgcgtctgcgggtagatggtgttgcggttgcccgagcgtgaaaacaccggtgcctcgccccaatcattgccgcgaatcatgtagccctcgcagttcggctccatccacgcactgccatcggtgggcgcgccgatgtagttggggtgttcgcagtcggccacgcgctcgtagacgttgccatgcatgtcgtacatgccgaaggcattcggcgggtagctgcccaccggcgatgaatagctgtagccatcggccgggccataggtgttggcgtgcttggcgatgctgtagtccttgccctcgtcgaacgggaaggggaacggtccggtggagccggcgcgcgcggcgtattcacgctgggcttcgctgaccatgtggtactgctggccggttttcttcgacagccaggcgacgtattgcttgatgtcgtccatgtccatgcataccgccggctggcgcgggccctgggggtagcgtggcttgctggcgatgcattcacggccgggacgggtgtcgccgtcggcgatcttcacgccggtctggcggatgtagctgtcccattcaccggaggtgatatggaaacggctcatggcgaacggcttggcgaaggtcacctcgtgcatcgggccttcatccggctcgcggccgacttcatcctcgggggtgcccatggtgaaggtgccagccggcagcaccaccatttccgggcagtccttgcagtccttgaacactttgccgggttgcggcgtggcggcctgggccaggttgggcagcaaggcgccgcacagggcggtgagtgccaatgccgtgaggggtttgttcatggggtcctctcattcaaagtggaaaagcggtgcattacacccgttggtccagcagcgtcatgaaacgctggatctcatcggaggaattaagcaggccgggcgaagtgcggatcaccgggccgacatcacggtccactgcgtcgatcaccacgcggtttttcatcatgtagtcggccacggcatcgctgtcctggcccttgacccggaagaaggtgaagccagccgacagctcgggactgcgcggggtgaccaactcgatacgcgggtgcgccagcaggtggtctttcagttcgctgttcagggcgtggatgcgcgcctgcacctgcgccttgcccaactgcagatgcagcttgaaagcctcatcggctgcccagcgatgctcgaaggcgtgataaccgcccggggtcatggtggtggcgaagtccttgtcttcggagaaggtcggcaccatcggggtcacgtactggttttgcgggtcgcgggcgcacaccacaccggtgccccgtgggccgaacatccacttgtgggtgccggcgatgaaaaagtcgcagcgcatgtccgggaagtcgaggttttccacgccgaaaccgtgcacaccgtccaccacatacaggatgcggtccctgtcgtcgcggttgcggttgtgttcttccaccagcttgccgatctcgccgatgggcagtttcacgccgctgccggactgtacccaggtcatgccgagtacacgggtgttggggcggatattgcgctggatattgcccagcacctcgtccacggacacctggttggcgtttttgaacaggctgatcttgcggacctgggtctgctccttgcgcacccggaagtccaggctgaactcggtagcgtagtgttcgtggacggtggtgaggatctcctggtcaggccgcaccttgatcccgccataaatcatcgccagcccttcggaggtgctgccggtgagggcgatctgcgccggcgtggccttaaggtagcgactggcccattcgcgcacctggccttcacgtttccaggtttcctgcaggccccagtccatggccaggcccgggttgcggtcgatctgcgcgcggtagcgctcgatggcttcgcgcaccggcttggggtgcgtggccaccaggaagttggaaaaatgcaggtagtccgggtcctggttgaacagttgcttgaaccccgtccatgggtcattcgatgcaggggcggcgatagcctggggcagcagggcggcgcccagtggcaggctggcggcaaataccccggcctgcttgaggaacgtacggcggtcggtcatggactggcttctggatgattaacggttggccaacggcttggcggatttttgtacctggtcccacacccgcaggaagttgccgccccacagtttggcgatatcggcttcggagtagccgcgctggatcagttcggcggtgacgttgcggatttcgccgacgttgttccagccctgcacgccgccgccatcgttgaagtccgaggcgaggccgacatggtcgatgccgatcttgcgcacggtgtagtcgatggcgtcccccaggtccttgagggtggccttgggttcttcatcgaggatgccgtacagcgcgctggcgtactcgccgaacttgtgttccggccaggcggcgatgatcgcgtcgcccggcatcaaggccacggccaggttgggcaggggcggcaggtcgaaccgtgcgcgcaggtcattgagcttgtcccgggtcggctggctcaacgggcgcaggtaggcggagaagcccacgatctgcactacgccgccgctctgcttgatcagttgcagctctttgtcgctcaggttgcgcgggatatccaccgacgcacgcggcgccgagtgggaggcgaccatcggtgtgcggctcaactgcgccacctgctccagggccttggtcgacatctgcgatacatcgatgatcacccccaggtcattgaggcggtgcaccgcttgcttgccgatgtccgacaaaccgtcgagggcgtcggtggagtcattgaaaaacggcagcgggcgcgacgagtccgaccaggcgttgttgcctacatagctgaagccgaacatgcgcatgccgcgcgccgcccacaggtccagcaggttcaggtcgttgcccagcgggtaggcgttgagcatgctgatgaagatcgcgaacttgccttcgccgtgcaggcgccggaaatcatccggggtgtaggcgatggcgacctggttggggtagtcgcgcaccatgccgctgatgatcttgtagcgcacttcctgttcgttgcgcgcggcttcgacaaaaccgtcggtgggcttgtgcggggcattggggccgttccagatttccggccagccgaaaatcgtcagcgccgcaccggacaagcgcccgcgtgccgctttggccaggtcaaactggccgctgccgtccttgtccgcctcgttgcctgcggtgccgaaatcgatgggtacggtgatatggctgtcgaacgacaacagccggtcctgcatttcattggcctgcttgatcacctccaacgggtaaccggcattgcccttgaaccagtgatcccagaccaggaaaccggctccggcaccgatggccagtgccaacggcaagccgatatacagcgcctttttcgaacgtggttttgtcattgccatctcagtcagttgaggccttcgctatcaggaaagaacgagtgataggcagggaaatttaggcgggcagggcgcgccggtaaatttccccggcgtgcaaacgttctagctctgataaagccgtttcctaaggtagacaatgaccatctctcgacgtgggttcatcgcaggcctggcgctgaccggcgccgctgtgccggccgccttctatgcccatcgcgagttgacgcgtgaagaagaattgcccatcacccccggcgaagccacggtagacctggccgataccgccggccagcacctagcgaacacgctgcgtggggtgtggagcctgcgcctggaaggccgcgacgccggcctcaagggcctgccgttggaaggtctggagttgctgctcgacatcgccccgcgtggacgtggcttgagggggtacctggacaccgctgccaacctgcgcgccaggggcgagccacgttaccgcgtgctgggtgacctgctgacaggggagagcgccgtgctctattggcgcctgatcgaccgcgacgcgattgacggcgtccccgcctatgagttcaagatgacccttgaccaggtctgggcggattttgccaatgccggcagcagcacactcagcggtcagatccttgacctcgaccggcccttggcgctggtcgagcgtgataaccgctttatcgcgcataaacagtggttccccgaggcccggcaacgcatcggtctgaacccgaccctgctggcctggctgatttcccccgaacaccgtctgttccaccaactgtggcatgccacccgtgaccagtggcacaaactctccgaagaaaagcgcgacgccctgcgcggcatcggctggcaacccggcccgcgtggccaggagcgcgacgcccggggcaagcgcaaggaccgcaacggctcgggtatcgacttcttcttcatgcaccgccacatgctcggcaccgcgcgctccatgcaggacctgccttcatggccgcaattccccgagccgcaaccggccttggagcgcgatcgcctgggctttctgcgctacttcgacaaccacgacggctttgcgctgccgcccacctggtgggcgccggatgacagcgactacacccagtgggtcagcgacatcaaggccgccgagacctatcacagcaatttccaggtgtgggagtcgcagtaccgcgacccgcgctacctggccagattcaccctggggcagctcggttccgaaatggagctgggcctgcacgactggctgcacatgcgctgggcctcggtgccccgcgacccgtccaacggtgcaccggtgcccatggcccgcgacccctccgacttcgccccgcgctggtacgcggcggaaaacgacttcctcggcgatccgttttcctcccacgtcaacccggtgttctggcacttccacggctggatcgacgaccgcatcgaagactggttccgcgcccatgagcgtttcaatccagggcaagtcagccgcatggaagtcaacggcgtagcctggttcgcgccgggccgctgggtggaagtcggcgacccctggctgggcccggatacccacggctgcagcaccaccccagggttgcagatgggccggtcgatggagatggacccggagaccatgaagctggcgctgcgcatcaccttcggtgaagacgaaaacaggctgcaggggctgttcaagcgggtgccgagacgaccgtggtacgcccggcacctgaaacttgcctgaacctgtagtgagcaggcttgccctgcgttggggcgcgaagcggccctaatccggccacctcgttttacctgaaagaaccagcggctttgatggggccgcttcgcagcccaacgcagggcaagcctgctcgccacagcaagctaaattgaaccaatcccgtcccaccttgtccccgcttcccatgtcaccccccgcccgccaaatcccttaattttccaagcctgccggaagcctctccaggcccccggctgcgcccgcgttttttgacggcggtgcgcccagcagacccgatccaaacggcagctgaaaacggactttcttctcaaccgtgacttatcaggcaggttacccccatgcagttcagcgaattattggcagcgatttccacccacgcgatccgtctgcaactggaagaaggcgacctgatcatcctgggtgacgacgaggcgctggacgatgcgctgtgggatcaactgatcgcccacaagccgcgcctgctggaactggtcgctgaacatggcggtgactggctgagcccggcctaccgcatcacgccggacatgctgccgctggtcagcctcgaccaggcggccatcgaccgtatcgtcgccgctatccccggtggcgcggcgaatgtgcaggacatctacccgctggcgccgctgcaggagggcatgctttaccaccatctgtcggcggagcagggcgatccctacgtactgcacgcgcagttcgagttcgacagtcgtgcacgtttgcaggcgtttgccgaagccttgcagtgggtgatcgatcgccatgacatcctgcgcacctcgatggtctggcagcgtctcgacgagccgctgcaagtggtgtggcgcaaggcaaccctgtcgtgcgaggccgtgggcttcgatgcgcgcaccgatcgcatggacctgggccaggcaccgctgctgcgcctggtgtacaccgcagatccagcggacgggcacgtggcggcaacgttgctgtttcaccacaccatcctcgaccacaccgcccttgacgtggtgcgccacgagatccagctgtacctggccggccaacaagcccaggccggtgagccggtgccgtttcgcagctatatcgcccaggtgcgccatggcgtcagcgagcaggcccatgaggcgtttttccgcgagatgctggcggatatcgacgagccgacgctgccgttcggcttgcaggacgtgcagggcgatggcctgggcatcgacgaggcgcgcgtccccgtcgacagcgcactgagtcgccgcctgcgtaccctggcccgcccgctgggcgtgagcgtggccagcatgatgcacctggcgctggcccgcgtattgggcgtggtcgccgggcgtgacgcggtggtgttcggcaccgtgatgctcgggcgcatgggcgcgggcgagggcggggagcgagccctgggcatgttcatcaacaccttgcccctgcgcgtggatgtgggcgagcagggcgtgcggtccggggtcaaggccacccatgagcgcctcaccgcattgctcaatcacgaacacgcctccctcgcgctggcccagcgctgcagtggcgtggcggcgccgacgccgttgttcagcgccatgctcaactaccgccatagcgccgccacggacatggccgaggtgatcgaggtggccgagggcatccgcgtgctcagtgccgaggagcgcaccaactacccgctgacggtcaacgtcgatgacctgggcgaggattttgcgctgacggtgatggtcgatgccgccattggcgccgaacgggtcgccgcttacctgcataccgccctggacagcctggccgacgcccttgagcagcgaccggatatgccgctcagcggcctgaacatcctgcccgacgccgaacgccacaccctgctgcacggcctcaaccacagccccacccaatacgccgataccgcactgatccaccatcaagtcgaagcccacgccgccgcccagcctgacgcgattgccctgcgctttgacaaccagcgcgttacctaccgccagctcaacgaacgtgccaaccaggtcgcccatcgcctgctggcccagggcattcgcccggatgatcgcgtggcgatctgcgtggagcgcggcccggagatgatcatcggcctactgggcaccctcaaggccggcgccggctacgtgccgatcgacccggcctacccgctggaacgcatcgcctacaccctggccgacagcgcacccttggcggtattggtgcaagccaatacgtgccatctggtcggcgacctgccacagatcgacctcaatggcttgcgcggcgagtccatcgtcaacccacgcgtcgacctcagcccggcccacctggcctacgtgatctacacctccggctccaccggccagcccaagggcgtgatgatcgaacaccgccaggttgcgcgcttgttcaccgccaccgaacactggttcggcttcaaccgcaacgacgtctgggcgttgttccattcctttgccttcgacttctcggtatgggaaatctggggtgcgctgatgcacggcggccagttgctgatcgtgccgcaactggtcagccgctcgccggacgagtgctacacgctgctctgcgaagccggtgtgagcgtcctcaaccagacgcccagcgccttccgccaattgatcgctgcgcaaggccagaacccccagtcccattccctgcgccaggtgatcttcggcggcgaagcgctggaaccgggcctgctcaagccgtggtacgcccgggcgatcaacgccggcacgcaactggtgaacatgtacggcatcaccgaaaccaccgttcacgtgacctatcgcgccctggaagcggcggatgcgcagttggtcggcgtcagcccaattggcgtacgcattcccgacttgcagttgtatgtgctcgatgcacgccgcgagccgttgccgctgggggtagtgggcgagttgtacgtgggcggcgccggggtggcgcggggttacctcaaccgtgaagcgctcaccgccgagcgcttcctggtcgacccggccagcggccagcgcctgtacaagaccggcgaccttggccgcctgctggcagacggcagcgtcgaatacctgggccgcaacgatgaccaggtgaagatccgtggcttccgtatcgaactgggtgagatcgaagcgcacctggccagcgccgagggcgtgcgtgacgcggtagtcatcgcccgtgaagaccagctgggcgacaagcgcctcgtggcctacgtgatagccgagggcgaactgcgtgccgccgacctgcgcgaccacctgttgctgagcctggccgactacatggtacccagtgcctttgtgctgctggataaattcccgctcaccaccaacggcaaactcgaccgcaaggccctgccggcgccggatgccgatgccctggcgcgccgcggttaccacgcgccccaaggcgcggtggaaacggccatcgcggcgatctggcaagacctgctcacgcttgaccgggtggggcgtgacgacaacttcttcgaactcggcggccactcgctgttggcggtcaagctgatcgagcgcatgcgccaggtcgatctcagcgccgatgtgcgcgtgctgttcggccagccgacgctggcggcactggccgctgcggtgggggggcagcacgaggtgcaggtgccggccaaccggattaccgccgccacccggcacatcaccccggacatgctgcccctggtggagttggaccaggctggcctcgaccacattatccagagcgtgcccggcggcgtcagcaatgtgcaagatatctacggcctggcgccgttgcaggccggtatcctgtatcaccacctgactaccaccgaaggcgatccctacgtgttgcaggtgcagttcagcttcgacgaccagacggcggtggacgcgtttgtccaggcgctgcacagcgtgatcgagcgcaatgacatcctgcgcaccgcgatcctctgggaaggcctcgacgagccggtgcaggtggtattgcgccaggcagcgctggccgtggagcgcatcgacgaaccgctggcgcagttgcagcaacgcttcgacccgcgtcacttccgcctggacttgagccgtgcgtcgctgatgcgctttgtctacgccgaagagcagggccgctttgtcggcatcctgctgttgcaccatatcctgctcgaccacaccgcgctgcaagtgctggtggaagaaatgagcgccagcctggccggcaacagcgcgcaactgcccgccgccgtgcagtaccgcaactacgtggcccaggcgcggttgggcgtcagccaggcgcagcacgaagcgttcttcagcgagatgcttggcgacatcgacgagccgaccctggccttcggcctgcaggacgtgaatggcgatggaagcggtatcatcgaggcccatttgcccttggagccggcactgagcctgggcctgcgcgaacaggcgcgacaactgggcgtgagcagcgcgagcctggtgcacctggcctgggcgcaggtgctggggcaggtgtccggccaacagtcggtggtgttcggtacggtattgctggggcgcatgcagggtggcgaaggtgccgaccgggcgctgggcatgttcatcaacaccttgccgctgcgggtcagcctcggtgccgtgggtgtgcaagccggcgtgcgcgccacccatgcgcgcctggcgcagttgctcgggcacgaacatgcgtcgttatccctggcccagcgctgcagtggcgtgccgggttcgctgccgctgttcagcaccttgctcaactatcgccacagcgcaccgggggaggcgccgggagacaacccgttcgcggcctccggcattcagatcctcagttccgaggagcgcagcaactacccgctggtgctcaacgtcgatgacctgggcacaggctttgccctcacggtacaaggcgtggcgagcctggatgtgcagcgcgtgggggactatatgctcaccgcgctgcgccatctggtgacggcgttgcaacaggcgccgaccacgccgttgcaggcggtgtcgatcctgccggccgccgagcgtcatcagatactggtggacttcaacgccaccgctcgcgagtacccggtgcacctcaccgtgcaccagttgttcgaagcccaggcgctggcccggccggaagcggtcgcggcagtgcagggcgcgttgtccctgagttaccgtgacctcaaccgccgcgccaaccgcctggcccatcacttgctcaaccagggtgtgcaacccggcgagagcgtggcgattgcactgccgcgttcgctcgacctgctgatctgccagttggcgatcctcaagtgcggcgcggtgtatgtgccactggacatcaacgcgccggtcgaacgccaggcattcatcgtgcaggacagtggcgcacaccgggtgctgacgaccctggccgacctgaacctggacgcgctgtcgccgcgcaacccggaactgccgcaggctgccgaaagcgtcgcctacatcctctacacctccggctccaccggcgcgccgaaaggcgtgcaagcgccgcaccgcgctatctcgcgcctggtgctgaataacggttatgccgatttcaatgcgcgcgaccgcgtggcgttcgcctccaacccggcattcgacgccagcaccctcgaggtgtgggcacccctgctcaatggcggctgcgtggtggtggtcgagcatgcggtgctgttgtcccaggccgcgttcgctgcgttgttgcaggagcaagccgtcagcgtgctgtggatgaccgccgggctgttccaccagtacgccgacgcgctgttgccggtgttcgcgcagttgcgctacctgatcgtcggcggcgacgtcctcgacccgcaggtgattggccgcgtgctcaggcacggcaagccccggcacctgctcaatggctacgggcctaccgaagccaccacgttttccaccacccatgagatcacccgggtcggcgagggcggtatccccatcgggcggccgatcgccaatgcccaggcctatgtgctggacccgcgccagcaaccgctgccgttgggtgtggttggcgagctgtacatcggcggcgcgggcgtggccacggggtatttgaaccaaccgcagctcaccgccgagaaatttatcccgaaccccttcggcgagggcctgctgtaccgcaccggtgacctggcctgctggcaggccgacggcaccttgctgtaccaggggcgcaatgacctgcaggtgaagatccgtggtttccgcatcgaacccggcgagatcgagacctgcctggccagtttcccgggcgtgaaggacgtggtggtgctggcccgcgaagaccagcccggcgacaagcgcctggtggcctactacacggccagtgtggcgctggagattgaagccctgcgcgctcacctgcaaggccgattgccggactacatggtgccctcggcctatgtgtggctggagctgttgccgctgaccgccaatggcaagctcgaccgcaagggcctgccggtgccggaccagagtgcgctgctcagccgtggtttcgaggcgccggaaggcgaagtggagacccagctggcgcagatctggcaggacgtgctcaagctggagcgggtcggtcgtcatgatcatttcttcgaactcggcgggcattcgctgctggcggtcagcctgatcgaacgcatgcgccaggtcggtctgagctgtgacgtgcgcgtgttgttcagccagccaagcctggcggcgctggcggctgccgtgggcagtggccgggaaatcgtggtgccggccaatggcattccacagggttgcacccggatcacgccggcgatgctgacgctggtgcaactcgacccggcggccatcgaacgtatcgtggcgaacgtgcccggcggtgcggcgaatgtgcaggacatctacccgctggcgccgttgcaggaaggcattctctaccaccacatcagcgccgagcagggcgatccgtacctgctgcaatcgcgcatggccttcgacagcctcgaacgtttgcacggcttcatggaagccctgcaacaggtggtggcccgtcacgacatcctgcgcaccggcgtggtctgggaaggcctggacagcccggtgcaagtggtttggcgcaaggcgcagctgagcgtgcaagcggtcgacctggacccggccgacggcgacatcatcgagcagttgcacgcacgcttcgatgcccgtcactaccgcctggacatcacccaggcgccgttgctgcgcatggtgtatgcccaggacccggagcatcaccgggtggcggcgatcctgttgttccatcacctggcgctggatcacaccgccatggaggtggtgggccaggaaatgcgcgcgttcatgttcaaccaggcgcaggacctgcccgaggcggcgccatttcgcaactacgtggcccaggcgcgcctgggtgtcagcgtggaggagcacgaggcgttcttccgcgacatgctcgccgatgtggatgagccgaccttgccgtttggtgtacaggacgtgcagggcgatgggcgcgatatcgaggaagctgaacaggctgtggatgccgcgctggcccaacgggtacgcgaacaggcgcggcaactgggcgtcagcgccgcgagcctgatgcacctggcctgggcacaggtgctggggctggtgtccgggcgtgacgacgtggtgttcggcaccgtgttgatggggcgcatgcaggccggtgacggcgcggaccgtgcgctgggtatgttcatcaacaccttgcccttgcgcgtggatgtggcggccactgccgccgctgcggtcaaggccacccatgggcgcttgagtgccttgctcggccatgaacacgcgtccctggcgctggcccagcgttgcagcggcgtggcaggtgcatcgccgctgttcagcgccttgctcaactaccgtcacagcagccccggtgaaatggcccgcgacggccacggcatctgggaaggcgtgcaactgctcggcggcgaagagcgcagcaactacccgctgaccttgagcgtggatgacctgggtgaaggctttgccctcacggtactggcgctgccgcagatcggcgcccagcgcttgtgcgcctatatgcataacgccgtagaacaattggtggcctgcctggaaaacgcaccgacgaccgtgctcaaccaactgccgatcctgccggcggcggagcgcgaaaccctgctgcgcgatttcaacgccaccgccgaggagttcccgcagaggcaaaccgttcatggtgcctttgaggtgcaggccgaacgccaaccccaggccgttgcggtggtgcaggacggtgaggcgctgacctacgaacagctcaaccggcgcgccaaccaactggcccatcatctgttggggctcggtgtacagcccgacgaccgcgtcgcgctctgctgccgtcgcggcccgcagatgctggtgggtttgctgggtatcctcaaggccggtgccggttacgtgccgattgacccggcctatcccgccgagcgcatcgcctatttgctccaggacagcgcgccggtggcggtgctggccgaagccactacccgcgacctgttgggcagcatcgccacgctggacctgcacgacccaggcctgcagcagtatcccgtcagcaacccacggctcaacgccttgaccccggcgcacctggcctacgtcatttacacctccggctccaccggccagcccaaaggcgtgatggtggaacaccgcagcgtggaaaacctggtgcactggcactgcgaagcctttggcctggatgcgacgagccataccagcagcgtggccggtttgggttttgatgccatggcctgggaggtctggccggcgctgtgcgtgggcgcgaccttgcacctgccgccggccgatctgggcaatgaaaacatcgacgaactgctggcctggtggctggcgcaaccgctggacgtcagcttcctgccgacgccggtggccgagtacgcgttcagccagcagctgcaacacccgaccctgcgcatcctgctgatcggtggtgatcgcctgcgccagttcacccacgaacggcgctttgcggtgatcaacaactacggccccaccgaagccacggtggtcgccacctccggccgtgtacgcgccgggcaggtgctgcatatcgggcgacccgtcgccaacggccgtgtctacctgctggacgcgcacttgcgtgcggtgccggtgggcgtagcgggcgagttgtacgtgggcggcagcggcgtggctcgcggttacctgaaccgcccggacctgaccgccgaacgtttcctgcaagacccgttcaacaccgggcgcatgtaccgcaccggcgacctggcgcgctggttgcccgatggcgctatcgagtacctgggccgtaacgatgaccaggtcaaagtgcgcggcgtgcgggttgaactgggcgagatcgaaaactgcctggcggccgcggaaggcgtcggcgaagcggtggtgctggtgcgcgacggccgcctgatcgcctggttcaccgcacagcaaccactggacatcgaggccctgcgtgcgcacttgcaagcccaattgcccgaggcgctggtgccggtcgcctatgtgcaggtgcaggcactgcccctgaccgccaacggcaagctggaccgcaaggccctgccgcagccggatcaagcggcgctgctgacccgcgaatacgcagcgccccaaggcgaggtggaaaccaccctggcgcgcctctggtccgaggtgctgcaggttgaacaggtggggcgccatgaccacttcttcgaactcggcggccactcgttgctggccgtcagcctgatcgagcgcatgcgccaggtcggcctgagtgccgatgtgcgcgtgctgttcagccagccgaccctgaccgccctggccgccgccgtgggcagtggccgcgaagtgcaggtgccggccaatcgcattactgccgattgccggcgcatcaccccggacctgctgacattggtgcaactcgaccaggcgacgattgatcacgtggtcgcccaagtgcccggcggcgccgccaacgtgcaggacatctacccgctggcgccgttgcaggaaggcattctgtaccaccacatcacggccgggcagggcgacccgtacctgctgcaatctcacctggcgttcgacaaccttgagcggctgaatgcctttgcccaggcgttgcagcaggtgatcgaccgtcacgatatcctgcgcaccgccgtggtctgggagggcctggcgcaaccgctgcaagtggtgtggcgcaaggccgagttggcggtgcaggcggatgtgcttgagcacctgcaccagcgcttcgacccgcgtcagtactgtgtgccgatgaaccaggcgccgctggtgcgcctggtgtatgcgccggacccggtgcatcagcgggtggtcgcgatcctgttgttccaccacattgccctcgaccacacggcgctcgacggcgtacgccacgagatgcaggccagcctgctcgggctgccgcagccgagcggtgcggccacgccgtaccgcaactacgtggcccaggcccgcctgggcgtcagcgaagcggagcatgagcagttcttccgcgggatgctcggtgatatcagcgagccgacgttgccgtttggcttgcaggatgtgcgcggcgacggcaacgccattgaagagctgcaactgaacctggacccgtcgctcaaccagcgcctgcgcacccaggcccgcttgcagggggtgagtgccgcgagcctgttccacctggcctgggcgcgggtactggccagcacgtccggccaggaacacgtggtgttcggcaccgtgctgctgggccgcatgcaaggcggccaaggcagtgaccgtgccctgggcatgttcatcaataccttgccgttgcgtgtcgacatcgatgggcgcggcgtacgcgctgcggtcaagcagacccatgcacaactgaccgcgctgctcggccatgaacacgcgtccctggcccttgcccagcgttgcagcggggttgccgcgccgcagccgttgttcagtgcgatgctcaactaccgccacagcgacagccggctggcgccggtgtcccaggcctgggaaggcatccagaccctggccagcgaggaacgcaccaactacccgttgacgttgaacgtggacgatcagggcgacggtttccgcctcaccgcgatgaccgcgcagtcgattggcgcgcaacgcatctgcggttacctgcaggtgaccttgcagggcctggtcgacgcgctggagcaggcaccgcagtgggcggtcaaccgcctgccggtgctggaggcccaggagcgtcagcaactgctggccggtttcaatgccaccgaagtggcttacgacctggagcagaccctgcacggcctgttcgaagcgcaggtgacgcggacgccggacgccatcgtcgtcaaggccgatgaccgcgtattgacctatgccgagctgaatgcgcgggccaaccaactggcccaccacctgctggaattgggcgtgcagccggattcgcgggtggcgatctgtgtggagcgcggcctggacatggtcatcggcctgtacgcgatcctcaaggccggcgccgcctatgtgccgctggacccggcgtatccgctggagcgcatcgcctacatgctcgacgacagcgcgccggtagcggtgctggcccagggcgcgacgcgggcattgctgggggacgtgccggtggtcgacctggaccagccgacctggcagcaacaacccaccaacaatccacaggtcgcggcacatggcgcctacgtgatctacacctccggctccaccgggcaacccaagggcgtgatcaacgaccaccccggcgtggtcaaccgcctgctgtggatgcaggacgcctatggcctcaaggcccatgaccgggtgctgcaaaaaacaccgttcagcttcgacgtgtcggtgtgggaatttttctggccgctgttcaccggcgcctgcctggtgatggcgcgcccgggcggtcacaaagacccggcctatctgtgcgaagtcatcgcgaacgaacagatcaccacgctgcactttgtgccgtcgatgctcgacgtgttcctggcccatggcgatgtaagccaggccgctggactggtgcgcgtgatgtgcagcggcgaagccttgcccggcagtctggtgcggcgcttcaagcagcagttgccggacatcggcctgtacaacctgtacggcccgaccgaagcagcggtggacgtgaccgcatggaactgcgcacggccggacgtcccggacaacacacccatcggcaaacccatcgccaacacccgcctgtacgtgctcgatgcacagatgcagcccgtgccattgggcgtggtcggcgagctgtatatcggcggcgtgcaagtggcgcggggttacctgaaccggccggagctgaccgccgagcgcttcctcaaggacccgttcaccggtggccgcctgtatcgcaccggggatctggggcgttacctggccgatggcactatcgagtacctggggcgcaacgatgaccaggtgaagatccgtggcctgcgcatcgaactgggcgaaatccaggcgcgcctgctggaacatccccaggtcagcgaagccgcggtggtggcccgtgaagagcggctcgtcgcctactacaccggcgctcgctcagccgacctgcgcgagcatctgttgcagcacctgccggagttcatggtgcctgcgctgttcgtgcacctggacgcgttgccgttgagccccaacggcaagctggaccgcaaggcactgccggcgccagacgccgatgccttgaccctgcgcgactacgaagccccggtgggcgacaccgaaatccttctggcgcaactctgggccgagctgctcaacgtggagcgggtagggcgccaggacaatttctttgaactgggcgggcactcgctgctcgccgtgagcttgatcgggcgcttgcgccaggaaggcatggaagccgatgtgcgtgggttgttcgaacagccgaccctggccggctacgccgcaatgactgaacgaatggagatcgtcctgtgagcattctcgaactgctggcgacgctgaaagccaaggatgtgcaactcgcgctcaagggcgagcaattgtcggtgcaaggcaacaagcaagcgctgagcgacccgttgatcctcgccgccctgcgcgaacataaaccggcgctgatcgagctgatcaaggctggtgactactcggcggccaacgaggtgccggccaatggcatcccggctggcgccacacagatcaccccggcgatgttgaccctgtccgagctgagccaggacgagatcgaccggatcgtcgccaccgtcgacggcggggtggcgaatatccaggacatctacccattggcgccgctgcaggaaggcattctcttccaccacgtcagcaccgagcagggcgacccctatgtgatgcagtcgcagttcgccttcgactctatcgagcgtttcgaggcgtttgcccaggccctgcaaggggtgatggaccggcatgacatcctgcgcaccggcgtggtctgggacggcttgcagcaaccctcgcaagtggtgtggcgcacggcaacgctgccggtgcaggcgctggagctggacccggccgacggcgatatcgccggccagttgcatgcgcgtttcgacgcccgccattaccgcctcgacgtgacccaggcgcccatgctgcgcctggcctgggccaacgacccggcacagcagcgcatcgtcgccatgctgctgttccatcacatggccctggaccacagcgccctggaagtggtgcgccatgaaatgcaggcgttgctgcaaggccacgccgggcaattggggcacgccgtgccgtttcgcagctacgtagcgcaggcgcgcctgggggtcagcgagcaacagcacgaggcgttcttccagcagatgctcggcgatgtgctggagccgaccttgcccttcggcctgcaggatgtgcagggcgatggccgtggcatcaatgaactcgactggccgctgacagacacactcaaccagcgcctgcgcgctcaggcccgcgtgcttggggtcagcgtcgccagcctgtttcacttgggttgggcgcgggtgctgagtgtgctggccggcaagtcccaggtggtgttcggcaccgtgctgatggggcgcatgcagggcgggcatgctacggaccgcgccttgggcatcttcatcaacaccttgccgtttcgcgtggacgtgggcgacgacgacctgcgcagtgcggtcaaggccacccatgcgcgcctcaccgggctgttgcgtcacgaacacgcgccgctggccttggcacaacgttgcagcggcgtggtggcgccgaccccgttgttcagcgcgttgctcaactatcgccacagcggcactggcaccagcagcgaagcggtggcggcgtggcagggcatcgagacactgcgttcggatgaacgtaccaactacccgctgaccttgagtgtcgatgacctcggcgaagggtttgtcctgcggctgctggcgactacccaggtcgatccgcagcgtgtctgcgcctacctgcaaaccgccctcgaccatctggtgacggctctggaggaggcgccgcataccgcgctgaatcagctggcagtggttcccgccgatgaacagcgcttgctgttgcagcacttcaacgccacccaggcggacttcccccaaggcgaaacgctgcacgcgcgcatcgaagcccaggccgcgctgagccccgacgccattgccgccgtgcatcagggccgccagctcacctatgccgagctcaaccagcaagccaacctgctggcccatcacctgctggcgctgggggtcaagcctgacgaccgcgtcgccatcgttgcccgtcgcggcctcgataccctggccgggctgctggcgatcctcaaggccggcgcctgctatgtgccggtggacccgtcccacccggccgagcgcctcaactacctgctcagcgacagcgcgccggtggcagtgttgacccagcaggcgctgttggagcgcctgccggccctcgaagtgccggtgatcaacctcgaccgctacacctggcagcaccattcggcgagcaatcccaaggtggcggtcacgccgtccaacctggcttatgtgatctacacctccggctccaccgggctgcccaagggcgtgatggtcgagcaccacaccgtgaccaacctggtggactggcattgccgcgcctttgacctgtgcgccgggcgccatacggcgagtgtcgccggcttcggctttgatgcgatggcctgggaagtctggccggcgctgtgcgtgggcgcgaccctgcacctgccaccggcccatgacggcgccgaggatgtcgacgcactgctggcctggtggtgtgcgcagccgttggatgtgagcttcctgcccacgccggtggccgagtatgcgttcagccagcagctcgaacacccgacgctgcgcacgctgctgatcggtggcgatcgcctgcgccagttcggccgtgcccagcgttttgacctgatcaacaactacggccccaccgaggccacggtggtcgccacctccggcaaggtcgaggcgggccagccgttgcacatcggcaaacccatcgccaacgccaccgcgtacctgctggatgagcaacagcagccggtgccgctgggcgtgacgggggagttgtacgtgggcggcaaaggcgtggcgcgcggttacctgaaccgcccggagctgaccgccgagcgtttcctgcacgacccgttcaaccccgggcgcatgtaccgcaccggcgacctcgcacgctggctgccggacggcaacatcgagtacctggggcgcaatgacgaccaggtgaagatccgtggcatgcgcatcgagctgggcgaaatcgaaacccagctcaatcatctggcgggcatccaggaagccgtggtgctggtgcgtgacgagcgcttggttgcgtatttcaccgaacagcgccaactcgacccgctggcggtgggcgatatccgcgcccacctggtggcgcacctgccggactacatggtgccggtcgcctacgtgaagctggacacgttgcccctgaccgccaatggcaagctcgaccgcaaggccttgccggcgccggacatggcggcgctgtttacccgcgagtacgtggcgccggaaggcgagatcgagaacgtgctggcgcagatctgggccgatgtgctgcaggtgcagcgcgtggggcggcgtgatcacttcttcgaactgggtgggcattcgttgctggcgatgcgcatggtctcgcaggtccgtcagcgcctgggtgtcgagttgctgctgggcgacttgtttgccaatgccgagttggcagcggtggctgaggtgttggctcagtcaggtcgcagcaccttgccggctattctcccggccaatcgcgatgaacccacgccgttgtccttcgcccagcaacgcctgtggttcctggcgctgatggaaggcgccaacaccgcctacaacattcccatcggcctgcgcctgcgtgggcagttgcatgtgcaagcgctgcaacgggctttggcgcgcatcgtcgcgcgccacgaaaccctgcgcagtcgctttgcccagcacggtgacgaggcccaggtggtgatcgtgcccgccgaagacgtgctgcccctgcaagtgcaggacctgcgccgccacccgcagccgcagcaggcgctggacgctctgatccatggcgaggcctcggcaccgttcgacctggagcgcggcccgctgctgcgtgggcgcctggtggtgatggccggcgatcaccatgtgctgttgctgaccctgcaccatatcgtttccgatggctggtccatgggcgtgctcacccgtgaactgatggcgctgtaccaggcctccagccacggccagcccgaccccttgccggcgttgccgatccagtacggcgacttcgccatgtggcagcgcctgtggctcagcggcgaagtgctgcagcgccagagcaccttttggcaacaggccctggccggtgcgccggccttgctcacgctgcccaccgaccgcccgcgcccggcgcagcaggactacgccggcagcagcgtcgcggtgcgcctggacgaacgcctcactgccgggctcaaggccttgagccaacgccacggcaccacgctgtacatgaccttgatgagcgcctgggcctcactgctggcgcggctctccgggcagcacgatgtggtgatcggctcgccggtggccaaccgcacgcgcagtgaagtggaagggctgatcggcctgttcgtcaacaccctggcggtgcgtatcgacacctccggcgagctgagcaccgaagcgctattggcgcgggtcaaggcccaggccctggaagcccaggcccatcaggacctgccgttcgaacaagtggtggagatcacccggccaccgcgcagcctggcccacagcccgctgttccagaccctgctgacctggcaggacagcagcgcaccgaccctggccctgggcgacctggccttggagggcatcgtcgaggacagccactttgccaagttcgacctgtccctggacttgtcggaagtgcagggcaccatcatcggtgcgctggaatacgcggtggcgctgttcgacgcatcgacggtgcagcgttacgtcggctacttcacccgcgtgttgcaggccatggtggacaacgaccaggccgtgctggaacaggtacctctggtggatgagcgcgagcgccagcacctgctgtttgatttcaacgccaccgaagtggcttatgaccttgagcagactttgcatggcctgttcgaagcacaggtgacgcggacgccggacgccatcgccgtcaaggccgatgaccgcgtattgacctatgccgagctgaatgcgcgggccaaccaactggcccaccacctgctggaattgggcgtgcagccggattcgcgggtggcgatctgtgtggagcgcggcctggacatggtcatcggcctgtacgcgatcctcaaggccggcgccgcctatgtgccgctggacccggcgtatccgctggagcgcatcgcctacatgctcgacgacagcgcgccggtagcggtgctggcccagggcgcgacgcgggcattgctggggggcgtgccggtggtcgatctggaccagccgacctggctgcatcaacctaccgaccaccctcaagtgcctgccatcagcgcctacgtgatctacacctccggctccaccgggcaacccaagggcgtgatcaacgatcaccccggcgtggtcaaccgtctgctatggatgcaggatgcctatggcctgcaagcccatgaccgggtgctgcagaaaaccccgttcagcttcgacgtgtcggtatgggaattcttctggccgctgttcaccggcgcctgcctggtgatggcgcgcccaggcggtcacaaagacccggcgtacctgtgcgaggtgattgccgccgagcagatcaccacgctgcacttcgtgccgtcgatgctcgacgtgttcctggcccatggcgatgtgagccaggcagctggactggtgcgcgtgatgtgcagcggcgaggctttgcccggcagcctggtgcggcgcttcaagcagcaattgccaggcagccaattgcataacctgtatggcccgaccgaagccgctgtggatgtgactgcatggaactgcgccgggccggtgacgccggacaacacaccgatcggcaaaccgatcgccaacacccgcctgtacgtgctcgacgcacagatgcagcccgtgccattgggcgtggtcggcgagctgttcatcggcggcgtgcaagtagcgcgcggttacttgaaccgcccggaactgaccgccgaacgcttcctcaaggacccgttcaccgatggccgcctgtatcgcactggcgacgtaggccgctacctggtggacggcactatcgagtacctggggcgcaacgacgaccaggtgaagatccgtggcctgcgcatcgagctgggggaaatccaggcgcgcctcaccgactacccgcaggtcaatgaagccgcggtgatcgcccgtgacaatcgcctgattgcctactacaccggggcgttcagcgagatcgatgccttgcgcacgcacctgttgcagcacctgccggagttcatggtgccggcgatcttcgtgcatctggagacgctgcccctgagccccaacggcaagctcgaccgtaaggcactgcccgcgccgggcctggactcggtggtggtgcgcgagtacgaagcgccccagggcgacacggaaatcgccctggcctgcctgtgggccgagttgctcaacgtggagcgcgtgggccgtcacgacaacttcttcgagctgggtggccactcgttgctcgccgtgagcctgatggggcgcatgcgccgcctcgggttgtcggcggatgtgaaggtattgttcggccagccgaccttgtcggcgttagccgccgcgttgggcggcgggcgcgaagtggcggtgccggtcaatggcattgctgccgattgcaccgcgatcaccccgggcatgttgccgttgatccagctggaccagccggccatcgagcgtatcgtcgcctgcatcccgggcggcgcggcgaatgtgcaggacatctacccgctggcgccgttgcaggccggcatgctctatcagcatcgcgccgcgcagggcggcgacgactatgtgttgcgggcgcagtttgcgttcgacagcgcccagcgcctggaggcgtttgccctggccttgcaggcggtgatccagcgtcatgacagcctgcgttcgtcgttccactgggacggcctggaagaaccggtgcaggtggtgtggcgcgaggccgcgctgcgggtcgaacgtgggccgatgccggagcggctcgacctgtcccaggcgccgctgatgcgcctggtggtgagtgaagacagtgccaccttgctgttccaccacctggtgatggaccacatcgccctggagattttgcagcacgaaatgcaggcgtttctctcgggcacccaacacaccctgggcgcgccggtgccgtatcgcaactatgtggcccagacccgcttgggggtggacgatcacgaggcgttcttccgcgagatgctgggcgagatcgacgagccgacccgcctggaaacccttggcggcaatgagcaggttcactgtgcccttgacctggcgttgagccaacgcctgcgcacccaggcccgacaatccggggtgagcgccgccagcctgatgcacctggcctgggcgcacgtgctgggcaaggtctcgggccgtgagcaggtggtgttcggcagcgtgatgctcggtcgcctgcaaggtggcgaaggggccgagcgggccatgggggtgttcatcaacaccttgccgctgcgggtcgacctgggtcggcacagcgtgcgcgacgcgttgcatgccacccacgcacgcctcactcaactgctcagccacgagcaggcgccgttggccttggcccagcgctgcagcggcgtgccggtgacgacgccgctgttcgatacgctgttcaactatcgccacagtgcgccgcaggtggcgagcgaggcttggcagggcatccgggtgctcaaggccgaggaacacagcaactatggcctgtcggtgagcgtggatgacctgggcgcgggtttctccttgaaagtcgtggggctgggcgcacgtcgcgtgtgcgactacctgcgcatcgccgtggagcaggtggtgcaggcgttggaacagggcggtacgacggccatcggccacgtgccgatcctgcctgccgccgaacgccagcaattgctcgacctgaacgccaccacccgcgcattcccgcgtgagcatacggtgcaacgtttgttcgaagcccaggcccatgcgcgtcccgcagccatggcggcgctgcatggcgagcaatcactcagttatggcgagctgaacagccgcgccaatcggctggcccatcatctgctgggccttggggtgcgtcccggcgatcacgtggcaatcctgctgccgcgctcgctaaacttgctggtcagccagctggccgtgctcaagtgcgccgccgcttacgtgccgctggatatcaacgctccgaccgagcgccaggcgttcatggtgcaggacagcagcgcggcctggttgttgaccggcagcgacgttgccgtcgactaccccgtgcagcgcctggacctcgacaccctggccctcgacccgcagccgagccataacccggatctgtcgcagtcgtcggacagcgtggcgtacatcatgtacacctccggctccaccggcacgcccaaaggcgtgttggtgccccatcgcggcatcacgcgcctggtgctgaacaacggctatgccgacttcaatgccagcgaccgcgtcgccttcgcctccaacccggcgtttgatgccagcaccatggacgtgtggggcccgttgctcaatggcggccaggtgcaggtgatcgaccatgccaccttgctcgacccggccgccttcggcgtggccttggcggacgcgacggtgctgtttgtcaccaccgcgttgttcaaccagtacgtgcagttgattccccaggccctggcgggcttgcgcatcctgctgtgcggcggcgagcgggccgacccggcggcgttccgcagcctgttggcgcaggcaccggcattgcgcctggtgcattgctacgggccgaccgaaaccaccacctacgccaccacctacgaagtgcggtcgctggccgagacggccgacagcgtgcccattggccgaccgatcgccaacacgcaggtgcatgtgctggacacgcagttgcagccggtgcctgtgggcgtgaccggtgaaatctgcattggcggcgacggggtggccaaggggtacctgaaccgtgctgaattgaccgccgaaaagtttgtgcaggacccgtttatcccaggcgccttgatgtaccgcaccggcgacctcggtcgctggacggcggagggcctgctggaatgcatcgggcgcaatgacgaccaggtgaagatccgtggtttccgtatcgaactgggtgagatcgaagcgcgcctggccggtttcgccggtatccaggaagtggtggtgctggcccgtgaagacgcaccgggtgacaagcgcctggtggcgtatttcacctgggccgatgagcccctcggcatcgacagcgtgcgggcctacctgcaaggccagttgccggactacatgctgccgtcggccttcgtgccgttggagcacctgccgttgaccgccaacggcaaggtcgaccgcaaagccttgccggtgcccgcgctggaagccttgcaccgccgcgagtttgaagcgccggtggatgctctggaacagaccctggcagcgctgtgggccgaggtgctgaagctggaacaggttgggcgccacgacagcttctttgaattgggtgggcactcactgctggcgatccgcctggtcaccctggtggaagacgctgggttgcacctgtccctggccgagctgttccagcacgccagcgtggcctccgttgccgcgctgttgcgccagcgtaccgccgcgccagtgggcgacacgtcggtgatcacggtgcgcggcagtggtgcgcaggcgccgctgttcctggtgcacgagttcagtggcatggacgtgtacttcccggcgctgggccagcacctgccgggtgactacccgatctacggcctgccgggcgtggccctgggcgaaccgcacttgaacaccatggaaggcctggcggcgcggttggtcggcttgattcgcggccttcaaccccatggaccttatcggctggccggctggtcgtttggcggcgtgctggcctatgaagtggcgatgcaactgctggggctggatgaggccgtggagttcctcggcctgatcgacagctacgtgccgcgcatgaccgaccagggcaaggcgcgctggagcgggccggacgcgctcaagcggcatttgctgttgcagtgcacggcgtattggaaagcacagggaggtgcggatgaactggcgagccttgaacacttggaggcagacgttggacagctggactttgcgcgcctgctgcaacgttgtcgcgatgaaggtgtgctgcacgcgcaaatggcggcggcgacggacgcggagctcttgaactatatccagcgcgaagtcggccacgggcatgcgttggcgcactacagcctgttcccgttgccggttccggtgtacctgttcagcgcgggtgagcgcccgactgagttgtcgcggcgcagtgagtcgctgggttggcaagaggtattggcgccggggcaattgcgccaggtacaggtgccgggggaccaccagagcatgatgcaggcgccgcatatccaggcgctcgggcgagcgatgagcgaggtgctaagggcctgttcgccggtggtgcaggcgccgcatcaacccatgttgcgtattcagagcggccgggcggggtatgcgccggtgttctgtgtgccgggtgcgggagacagcgtcaccggctttgtcggcttgggcgaggccctggggcgtgactggccgctgtttggcttgcagccgcgtgggctggacggtgaggcggtgccccatagccaggtggaagcggcggcggcgtgttacttgatggccttggaacaggagtgtgcgcaggggccggtgcatctggtcgggcattcgtttggtggctgggtcgcgctggagatggcgttgcgattgcaagcggccgggcgcgaagtggcgtcgttgacggtgatcgacagtgaggcgcctggtggggccgctaaggtgtacaccacgacggcggcgttgctgcgcttgatcgaggcgatgcagttgtcggccggcaggtcgctggggattgatccgggggattttgccgcgagtgatgaggtggcgcagcggcggcggttacatgccggcatggttggtgtcgggttgttgccggggcgttctgcggtgggtgcgatggaggggccggcgcgcacttatgcggcggcgttgcgtacagagtatcggccgggtgcgcggttcaagggcgtggtgcggttggtgttggcggaggatccggcgctggatgcggcggggaatcagcgggagcaagggttgatggtcgaggggtggcggcggcaggggagtgggttgcaggtttggtatggcggggggaatcactttacgttgctcaaggcgcccaatgtggttgggttggcgcgttggtgggtggatggggtggtggttggggaggtggtttcttgagtggattgtcggtgtacatatccgtcgcgtcggtaacggctagcccggcggcctcagggccgaccggtattgtgtttgtcgttcgcggctcgagtgtgggagggcgcttgcccccgatgacggtgtgtcagttgatgcatctgtggctgtcccactgcaatcgggggcaagccccctcccacagttttatctccatacatcaggtagatatcagcctgcttttgatctgctggtgatctggcgtttgatcccagacgccccgtaaaaccacgctgaccttcgttcgggcacaccgagcccgagtgtttgggcaagagcgttttgcttacttttgcgcttttcaaaagtgagccgccgtaagggcggaaccataagcggccgttacctaaataacggatatgtactcgatcaaaggccacccatggaaaagtcaaagttacgcaaactaggaatgctcacagtcatcacagtcgccatcggcctgatcatctacacggtccaggcccccgccgacgccccccaatacctcaccgccaccgccgaacgcggtgacatcgaaaacgccgtcctcgccaccggcctgctcgaaggcatcaaacaggtcgacgtaggcgcccaggtctccggccaattgaaatccctcaaggtcaaggtcggcgacaaagtgaaaaagggccaatggctcgccgaaatcgacccactggtcctgcaaaacaccttgcgcaaagcccaggtcgacgaagaaaacctccaggcccaacgccgcgccacggcggcccagctcaagcaggccaagtccgtgtacgagcgctacaaaggcctgcagatcgacgagtcggtttcacgccaggattttgaagacgccgagtccaacttccaggtgcaacaggccaacctgctgtccctggatgcgcagatcaaaagcgcccacatccagatcgacactgccaaggtcaacctggcctacacccgcatcgtcgcgcccatcgacggcgatgtggtgggcatcgtcacccaggaaggccagaccgtgatcgccagccagctggcgccggtgctgctcaagctggcggacctggacaccatgaccgtcaaggcccaggtctccgaggcggatgtgattcacatcagccccggccagcaggtgtacttcaccatcctcggtgaagccgacaagcgttactacgccaagctgcgcggcaccgagccggcgccgcagaacttcctggaaacccagaccgccggcacgccaaagcagaacacggcggtgttctataacgcgctgttcgacgtgcccaaccccgatcaccgcttgcgtatcgccatgaccgcccaggtgcgtatcgtgctcgatactgcccaggccgcgttgatggtgccggtggcggcgctcggtgcgcgcaacaacgacggcagctacccgctgcgggtgctggatgccaagggcaaggcggtgtcgcgggatgtgaagaccgggatcaacaacaacgtcaaggtgcagatcctcgacggcctggccgaaggtgacaaagtggtgatcggcgacgcaacccctgctgtggcggggaactgacggatgacccagccactgttggaactcaagggcatcacccgcagtttcatggccggcgagcgtgagttcattgcgctcaagggcatcgacctgacgattcatgccggggaaatggttgcgatcatcggcgcctcgggctcgggtaaatcgaccctgatgaacatcctcggcggcctggattacgccacggccggcagctacaagatcaatggcatcgaaacccgctcattgggcgacgagcaattggccgaactgcgccgtgactacttcggctttatcttccagcgctaccacttgctggcgcacttgagcgctttgcataacgtggagatgccggcgatctacgccggtacatcggaaaccgcgcgccatagccgtgcgcgcgagctgctggcgcgcctggggctggcgggccacaccagccaccgtcccagtcagctgtcgggcgggcagcagcagcgggtgagtattgcccgggcgttgatgaacggcggtgaagtgatcctcgccgacgaacccaccggcgccctcgacacccacagcggcaaggaggtcatgcgtatcctcgctgaactgcacgccgccgggcatacagtgattatcgtgacgcacgaccccaaggtcgcggcgaacgcccagcgcatcgtcgaggtgtgcgatggcgagattgtcagcgacaaggccaatgacagtgtcggcctggagctgcccagcgaaacccccatcgagcctaaacgcagcggcgcccggcgtctggtggcgagcctggggcttttcaaggaggccttcaatatggcctgggtcgcgctggtgtcccatcgcatgcgcaccttgctgaccatgctcggtatcgtcatcggcatcacctcggtggtgtcgatctcggccatcggcgaaggcgccaagcgttatgtgctcaaggacatccaggccatcggcagcaacaccatcgatatcttttccggcaccagtttcggcgacagccgcgcctcggccatcgagaccttgatgccctcggatgtcgacgcgttgaaccagttgtattacgtcgacagcgccacgccggtggtgggccgcaacctgttgctgcgctttggcaatatcgacctggacgcgcaggtcaatggcgtgagtgaccgctatttcaaggtcaaggggctgaagctcgaagcgggtatcgccttcagcgaaagcgatgcacgccgccaggcccaggtggtggtgatcgaccacaacacccgccatcgtctgttcgggccgaacgtcgacccgttgggccaggtgatcctggtgggtaatctgccgtgcacggtgatcggcgtgacggccgacaacaaaaacatgttcgccgccagcaaggcgctgaacgtgtgggtgccctatgaaacggcggcggggcgtttgttggggcaacgtcatctggacagcattactgtgcgcatcaaggacggccaaccgagcaaggtggtcgaagacaacgtcaacaagctgatgctgcaacgccacggcaccaaggatttcttcaccaacaacctcgacagcatcatgcagacggtgcagaaaaccagccgctccctggcactgttgctgtcgttgatcgcggtgatttcactgctggtgggcggtatcggggtgatgaacatcatgctggtgtcggtgaccgagcgcacccgtgagatcggtattcgcatggcggtgggcgcccggcaatcggacattcgccagcagttcctggtggaggcggtgatggtgtgtttgatcggcgggctgatcgggatctcgctgtcctatgccctgggctttctgttttcgttgtttgtgaaggaatgggagatggtgttttccctgggctcggtcatcaccgcgtttgcctgttcgacattgatcggcatcgtgttcggctttgtgccggcgcggaatgcggcgcggctggacccgatcgaggccttggcaagggattgaggcctgcttgccaatgagaacccaatgtgggagggggcttgcccccgattgctgtgtatcagccacaatttatattgctgacccaccgccatcgggggcaagccccctcccacattcagaccggtgtcgtcttaaaaaccagccgtgtcctcggtggcatacatccaccgcaacaacgaatgccgcccgctgatccccaacttgatcgccgcgcgtttcaggtaactctcgatggtgttgaccttcaacgccaattgctccgccaactccggcgccgtgcgcccggccagcaggccgacgcacacttcgagctcacggttggagagggtcagccccgattgcaccaggcgttcctcgatgcgccggcgcagggtttcgaggccctggttttccggggtcaccggttcgctgtccaggcggcacggctggatcgcggcgatgtgtttttcgaccatgggcaacagcagggtggagaagtcctgcagcatgctgcgctcctgcggcgagaaattttcggactggtgtgagcgatacaccgacaacacatagcgcacgtcgtcgcggcggcgggtgaggtgcaattgtgccgcaggttgctcttcgcccaaggcttctaccgagtcggtgtagaccgggctgatcttgcgccggacctgcccttcggcactcagttgcaattgcctgatatgggtggcgtccacggccagttgggtgaggatcaggtcatgcagcatgcgcggaaaatggcggctgccggtgctggcgatgaccttgccaatatggggaaacagctgtgagttcatcaattcgtccatgaggcgtgcaggtattcggccttatagcgacggggattaagaggcatgccaatgcgaataacctgcggtgataatccttcccgccggaacctatgctagtacagcctggcggcgggaaggggatccaatctaaaaaaattggattagacactcacgagtttggacttgtgttgcggcgtgcgcgtgcatttggccagtgcctgctgcatatcggccagcaggtcggcgacgtcctcaaggcccaccgacaaccgcaccagcccttcgctgataccgtgccgggcgcgttgctccggggtgtaggtggagtgggtcatgcttgccgggtgctgggccagtgactcggcgtcgcccaggctgacggcacgggtaaacagcttgagggcattcatgaagcgccggccggtttcgattccgcccttgagttcgaaggcgatcatgccgccgggcattttcatctgccgtgtcgccagttcgtgttgtggaaaagaacgcagccccgggtaagtcacgcgctccacggcggggtgtgcctgcaaggcctcggccaccgcctgggcgttgctgcaatggcggtccatgcgcagggccagggtcttgaggccgcgcatcaacagcgaggcatcctggggcgacatgacggcgccggtcaggtccttgaggccttgcaggcgaatgcgctgggccagcgcctggctgctcacggcaatgcccgcagtgatatcgccgtggccgctcaggtatttggtcgccgaatgcaccaccacatcggcgccgagttccagggggcgttgcaggtagggcgtgcagtaggtgttgtcgaccactacggtgatgtcgggttgctggtgggcgagggcggcgacggcggcgatatccaccagttgcaggttggggttggccggggtttcgcagtagatcatgcgggtcgcggggctgagtgcggcttgcagggccgccaggtcagtgaggtcgacatgccgcaccttgatgccgaactcgccgatgccgtggtgcagcagggcgaaggtgcaaccgtacagcgtctggctgacgatcacctcgtcgccggggcgcagcagggtccagaacgttgcggcaatcgcccccatgccggaactgaacgccaccgccgcctcaccgttttccagggtcgccatgcgtgactccagcagtgccagggtcgggttggaaatgcgcgtatagaagtggccgctggcttcccctgcaaaacaggcggcgccgtattcggcggtggggaaggcaaaggtggcagacaggtaaatcggcgggacgagcgcgccgtggtggtccttggggtcgtagccgtggtggatggcgcgggtggaaaagccgaatgcattgtgtttattgttcatgtcggacgctccttgtttcctacaatgctatgctcataaccacagatgaattttgcgatatttgctgctaattcccgcgtcctgggatgaaaacctcataaaaataacgaatagaggcacgttatgcctgtcagtctggatcgcaccgataaagcgcttttaaacgcgttgcaaggtaatgctcggctcaccgtggctgaattggccgaccgcgtttccctgacgacctccccgtgttggcgccgggtgcgcaacctggaggagagcggggtgatcagtgggtaccaggcgattctctcgcccaaggcgctggggtatggggtgacggcgtttgtcagcatcatgatggagagtcacacccaggacattgcccgggcattcgagcagcggctgttggagattcccgagattgtggcgtgtcataacgtgtcggggcggtatgattttttgttggaagtggtggcgagggatctggagtcgtttggggagtttgcgcgggaggtgttgcagacgttgccttgcgtcaaggagatttattcgagtttttcctataagtcggtgagggggttgcgggtgattccggtgccggggtgattgggtggtgtgttgtgtacatatccgtttcttcggtaacggctacttagggttccgcccttacggcgggtcacttttggaaggaccggaatgccggcccagccaaaagtaagcaaaaggtcctcgccccaacactcggcacctcgcctaggctcggtgtgccctcactccggcttgaatccgtgggccgccgtcatgggccatccctggcccaggacggctaacccggcgtcctgccgggttacccacggattcaagcctgcgttcggccagcgtgtttgacggggcgccccagatcaaaagcaagagcgcggcggccttagagccgaccggattgtatggcccgtactcggtcaaagtgtgggagggggcttgcccccgatggcagtgggtcgtcactgatgagttggctgacacaccgccatcgggggcaag

SEQ ID NO: 6 - DNA, 60447 bp, Pseudomonas nodulensis
gacacgcaactggaaccctatcgggacggtgtacctcaatcccgaaagggagctgacagttgtcgtgaaggtcgcctagcaagacgggagacacgacaactaccttgaaaaacgccgggctctggctctggcctttgatctgcttttgattttgatcttaggcgccccgtcaaacacgctggccggaattcggcagggatttggggggtaaaccggcagggatgccggtttagccgcctcgcgccatggatggcgcgtggcggcggccccccaaatcactgtcgaattacgggcataccgagcctaggcgaggtgccgagtgttggggcaagagcgttttgcttacttttgcgcttttcaaaagtgagccgctgtaagagcggaaccctaagtagccgttacctaaataacggatatgtccccaatccaacccaaccccccccaaacagcacgtacatccaattttccccaccccatcccccctcaaactccctcatcgctgaatcttcaaggcagagggacaccccatggacccaaccacaaaaccaggccccgacgaagtcgtcaccctggtggtcaaacacctcatcaaacccggcctggaggccgactacgaagcctggctgcgccgcatcgtccgcatcgccggcgaccgccccggccacctcggtgtcgacgtggtacgcggaaaacaaggcaacctggcgcttttcacctgtgtattgcgctaccgctccaccgaagacctggaaacctggctcgactcccccgagcgcaaaaccctgatcgccgaagccgcgcccatgctcgccgacggcgacaacaccgaaatcggcgcggtcaacgaattctggttcaaccccgaaaccccaaacgccgccaagccgccgcgctggaagcaggcggtggtcaccctgtgtgtgatcctgccgctgaccctgctggtgccgatcgtgtggggcccggtgctgcgcctgcacccgtttctctccaactacgtggtcgccacgttcctggtgaccgtgaccatagtcgtgctggtggtctacctgctgatgccggcggccacccgcctgttcgctccctggcttgaagcctctgtaaaggaaaccctatgaacgccgatctgattctgttcaatggccagttccacaccgtggaccgtgaaaacccgcgcgccacggctgtcgccatccgcgaggggcggtttgtcgccgtgggtaccgacggtgaagccatggccctgcgcggcagtggcacccaggtcatcgacctcaagggccgaaccgtcatccccggcctcaacgactcgcacctgcacctgatccggggcggcttgaactacaacctcgaactgcgctgggagggcgtgccgtccctggccgatgccctgcgcatgctcaaggaccaggccgaccgcaccccgacgccacaatgggtacgcgtggtagggggctggaacgaattccagttcgccgaaaaacgcatgccgaccctggacgaactcaaccaggccgcgccggacaccccggtgttcgtgctgcacctgtacgaccgcgctttgctcaaccgcgcagcgctgcgtgtggccggctacaccaaggacacgcctaacccgccgggcggcgagattgtgcgggacagcaacggcaaccccaccggcatgctggtggcgcggccgaacgcgatgattctgtattcgaccctggccaaaggcccgaaactgccgttggagtaccaggtcaactcgacccgccagttcatgcgtgaactcaaccgcctgggcctcaccagtgccatcgacgccggcggcggtttccagaactaccccgatgactatgcggtgatcgagcaactggccaaggaccaacagttgacggtgcgcatcgcctacaacctgttcacccagaagcccaaggaagaactcagcgacttcaagaactggaccggcagcgtcaccctgcaccagggcgatgattacctgcgtcataacggcgctggcgagatgctggtgttctcggccgccgacttcgaagacttcctggagccgcgtcccgacctgccgttgaccatggagcaggagctggaaccggtggtgcgccacctggttgaacagcgctggccgttccgtttgcacgccacctataacgagtccatctcgcgcatgctcgatgtgttcgagaaggtcaaccgcgacatcccgttcaacggcctgccgtggtttttcgaccacgccgaaaccatcaccccgcagaacatcgagcgtgtgcgtgccctcggtggcggtattgcgatccaggaccgcatggcgttccagggcgaatattttgtcgagcgctacggcgccaaggccgccgaagccacgccgccgatcaagcgcatgctcgccgaaggcgtgccggtcggcgcgggcaccgatgcaacgcgggtgtcgagctacaacccgtggacctcgctgtactggatggtcagcggccgcaccgtcggtggcctggaactgcatgccgaaggcttgccacgcctgaccgcgctggaactgttcacccacggcagcgcctggttctcgtccgagcagggcaagaagggccagatcaaggtcgggcagttggcggacgtggcggcgctgtcggcggacttcttcagtgtcgatgaagaagccatcaagtggatcgagtcggtcctcaccgtggtcggcggcaaggtggtctacggcgccggcgacttcgaagatttcgcccccccgcgcgtgccggtgctgccggactggtcgccggtggtcaaggtgccagggcactggcgcccaggctcgccgttgcaggcgcaggtgcaccagtgcaacggcccgtgcggcgtgcatgcccacagccacgaaaaagcccgccattccagcgtgccggtcagcgacttccagggtttctggggtgcgttcggctgctcgtgttttgcattttgattacccatacccccgtaaggagttgaaccatggctagccctcgtttgaacaaagatgacgccgttgtactgttggtcgaccaccagactggcctgatttccctggtgcaggatttctcccccaacgaattcaagaacaacgtgttggccctggccgatgtggcgaagttcttcaagttgccaaccatcctcaccaccagtttcgaaagcggccccaacggcccgctggttccggaactcaaggaactgttcccggacgcgccgtatatcgcccgtcctggccagatcaacgcctgggacaacgaagacttcgtcaaggccgtcaaggccaccggccgcaagcagatcatcattgccggtgtggtgacggatgtgtgcgtcgcgttcccgaccctgtgcgcgctggaagaaggctttgaagtgttcgtggtcaccgacgcctccggcaccttcaacgaaaccgtacaacaagccgcctgggcgcgcatgactgccgccggcgcccaactggtgaactggttcgccgtggcctgcgaactgcagcgcgactggcgcaacgacatggaaggcctggccaacctgctgtcgccacgcatccccaactaccgcaacctgatgaacagctactcggcgttcactgccaagtaactggctcaggttattccttgtgggagggggcttgcccccgatgacggtgtgtcagtcacaacttctctgactggcccactgctatcgggggcaagccccctcccacaatttgttttgtggtgtgtccactaacaggctataaatccgagaaatgtccaccgagaagcgacaatgaaccccttcgaagacatgcgcctgttctgccaggtcatggaatccggcagcttcaccgccgccgccgaacagctgggcctgtccaagcagttcgtcagccgccgcctgatccagctggaagaccgcctcggcgtacgcctgctcaaccgctccacccgccggctggatgtcacgccactcggccagagttactacgaatccgccttgcgcctgctcagtgaagtcgagcaagtggagcagggcatcgctggccagaacagcgaaccacgcggcaccattcgcctcagcgcaccgttgtcgtttgccatggcccatctgggctgcctgttaccgcttttcctgcagcgccatccccaggtggcggtggaggtcgacttgagcgaccgtcccgtggacctgatcggtgaaggctacgacctggttttgcgcatcggtaccctggaagattccaccctgatcgcccggcgtatcgccagcattccccgggtgtactgcgccagccccgactacctggccttgcgtggtacaccgcaaaaacccgatgaccttgccgaccacgattgcctgccctacggccacggccgccaggtgcagtggcgcttcaagggcaagttgcaggcgctgagcgtgagcgggcgcatgcgggtgaacaacggcgacttgctgcgcgataccgccatcgccggtctgggcgtaacctacctgccgacctttatcgtcggcgaggcattgaaggacggccgcctggtcacggtgctggatgaattcgcccccgaagacctgacgctgtcggcagtgtacccgcagcaccggcaaagctcgcgaccggtgcaggcgctggtggagttcctgcgcgaacgcctggctagcggctgttgaagagctggcggatcaggttgggcgtactgccggtccagcgcttgaacgaacggcgaaagttcgccgcatcgttgaagttcaggtacgccgccacttcatcattgctatagcccttgacctgatacaggtgcaacgccacctgcttgcgcacgcggtccacctgctgctgaaagccggtgtcatgcttgtgcaacttgcgcttgagggtcgccgggctcatggcgaaggcctgcgcagcctgttccaggctgggcggttggcgtacctgttcgcgcaggtagtcgtagaggcagtcgagaaagctgctggagaagcccagttgttcgatctgcacacgggcttgctggcgtgccacctggccggcggtggccgaggcacctggccaggcgcgggtgaggtattcgcgggggatgctcagcatgtccagcggccgttcgaagcgcgtctcttcgtccagatgcacccaatactgctcgacgtaacgcggctcggcatgactgaaactgcacgcccacggcaggcgctcgccgctgagccattggctcatggcgaccagcgaggtcatgctggcttccagtaaaaaccgccaatgctcgccggcgccgcaactgtctcgccagtacaggtaggcgtggtgcgcatccaactccagttgcagggtggccagtgggctgagcagcacctgttgctggatcaggatctccagggcctggtgcaggttctgcgcatgccccagggcatggctggccgcgccgtagtagccgggcaagagccgctggccgaacagaaaactgctgtcgtcggcgtcaagcaatttgcgactgttgccgatcaacccgaaaaactgctgcgggctcaaccgcgccgtgccggccaggatgtcctcgtgaaacagtcccgtgccgcgcagcaggcgatggctgtcgatgtcccgggacaaggccaggtcgatcagcgtggcgggttggtagtgccctggtatgaagcggctgtcggcttcataccagctggttttcacggccatctcaggcgcttttcgccagaggttgcttggccctggcgagggccaggttgaggcgcttgagcaagtcctggggcggctcgtccagggccatgaccacggcggtggtcgccgccagttgcaggcgctcaccgtgcagtcgggtcttgtgtgcaaggccgcgcactgcctgctgcaactccagcgccagttccttggcctggcgctcaccggtgttgggcagcagtaccacaaaacggtcgccggccaggcggcacagcagatcctggcggcgcaggttgagcaacagcaaatggctgagggcctgcagcaccgcatcgccttcggcatgcccgtaggcctggttgatggccgcgaagttgtccaggtccagcgccagcagcgacagcggttgctgctgggcctggctgtcttgcaggctctcggccagctggcgcttgaggtagtcggcgccggccagcggcgtgagtttgtcgaacagccgatgctcacggaacagtcgctcgcgtttctccatctgtgcgctgatcgccagttgttcgcggtgccagtggtagataccaatggtcagcaggatcatgcccaccggcatcggcccggactccagccagtggtcccaggtaatgctgtcgggcaggcggatgaattcgtcgaggctgtcgatccaccacgagaagaagatgcatgacaggcccagcgccaggtagttggtcacgcgcccggccggtcggcttttcagcaccagccctagccagatcagcgcgagcagggcggaaccgccttcgccgaagatatccagccacacccattcgctgacgcttttcaactcgccgcaggccaggtgcaggatcagccccaggtttgcggcgatcagcagcagggagagtttccagcggtggggtttgagcacggaaaacatggccgcgagtccttgcaaggttcagtcgtgggcgccagcacagcagatggatgtgacggttgcgtgacgcagggcaggggtcgaatcagctcatcccgccgacaatgaaacgcagaaaatgtgggagggggcttgcccccgatagcggtgggtcagtgaaaaatcagggggctgatccactgctatcgggggcaagccccctcccacagttgatcttcacaggtcatttcagctcattccaactcaagatcctgctcaagcccccggtttacggggctccccgccactcgctgtcacagaacggtcatcccccacccctagcgtgccctcccagttgccgggcctcttgcctggcgccaacggactcttggggaggattgcatgtacaagcgcaccgggctcgtcagcttcacgcttactgccttggccctggcgattgccagcgagcgactcaacgcggccgaagtggccaacgccgagcacgtcgaagtggtcggccaggcagcggccatcgaccaggcgctcaaggagcaacgcaattcggacagcatcaagagcgtgatacatgccgacggcgtggcccagttgccggatgaaaacgtcgccgaagcggcgcagcgcctgccgggcatcagcgtggagcgcgaccagggcgaagggcgctttgtcagcgtgcgtggcctgggcccggacctcaacagcgtgaccatcaacggcaccctggtacccgccccggagagcgctcgccgcgcggtggccctcgatgtgctgcccgcggagctggtgcagtcgctgtcggtgatcaagaccctcaccccggacatggacgccaactccctcggcggcacggtggatgtgcaaagcctgtcggcgttcgaccacaagggcctgttctacaccggcagcaccgaagccagttacgacaagaacacccatcagaccagccccaaattctccggcgcggccagcaaccgtttcagtcttggcgacggcatcgacaatttcggcgtggccgctgcactgagctggcagaagcgcgacttcggctcggacaacgtcgagaccggtggcgcctgggacttcaccgacggtgctcgactcaacgagttcgaacagcgtgactacgacatcagccgcgaacgtgccggtggcggcctgaacttcgactacaagcccgacgacctcagcagctactacctgcgcaccctctacagccgctacaaagacaccgaaacccgcaactccaccagtctcgaattcgccgacccgcaggcccccggccagctgggcgatgccgagggcaagcgcaagctgaagaaccgcgaagagacccagcaaatccagtcctacgtgttcggcggcgaacgcatgctcggcctgtggaccctgagcggccaggccggctacagccaatccagcgaagacagcccggcacacatcgccggtgccaccttcgacggcggcgactttgccaacagcggtttccatgacaagggcaagccacgcccgatcatcggcagcggcttctacgacgcgcgtaacttcagcctcgacaaagtcgactgggaaaaacagaacacccaggacaccgagaaaaacctgcgcctggacctggcccgcgactacgacctgagcggctatgcgtcccaggtcaaattcggcggcaaggtcagccgccgcaacaaggacaacgatctggaagcctgggtctacaaagacttcgacaccctcggcttcactgccgaccagctcaacctcacccagttccagaagggcaacgtcgactaccgcctgggcaattacggccccggcatcagccccagcgcgatcaagcagctgatcggcagcctcaacccggcggacttctatgacgagaccgaatcgcgggtcaacgacttcaccattcgcgaggacatcaacgctggctacctgatgaacactgtcgatattgacgactggcgcttcatcgccgggctgcgttacgaaggcactgagttcgaagccaagggcaccggcgccaccgatggcgtgttcaccccgaccgacacccagcgtcgctatcaccattggctgccgggcctgcatgcgcgctaccagatcgacaagaacacccaggtgcgcgcggcctggaccaagtccgtggtgcgcccgacctttggccagttggcgccgggcttcgtgatcgacgatgacgaagccaccttcggcaacccggacctcaagcccctggagtcgagcaacctggacctgggcatcgaacacttcatgggccgcgccggcaccgtctcggcgttcgtgttctacaaggacatcaagaatttcgtctacaacactgacctggccggcaccggcgcctggaccaacttcgccgaggcccacacctacgccaacggcgacagcgccaagctctacggcctggaactggcctactcacagaaattcgactggctgcccgcgccgtggaacggactgctgatcggtgccaacagcacgttcagccgctccagcgccgacatcgaaggtttcgacagtgccagtggcacgaaccgcaagcgcaacatcagcctgcccaaccagtccgacaccgtcggcaacctgatgctcggttgggaagacgacacgctcagcttgcgcctgtcggccaactacaaatcggcctacctctacgagttggcctcgatcaacgacaaggcccacgacctgcatgtggacgcgcagacgtttgtcgacttcagcgcgcgctactcgctgaccaagaacctgcaagtcagcttcgaagcgcagaacctcaccgatgagtcgtacttcgtctacaccggccaccgcagctacaacggccaatatgaagagtacggcccgacctacaagctgggcctgaccttcacccacttctaacccacacctcgattccattgtttttgacggattgacccgtacatgaagatttccaagctgtacctgctaatggccttgaccctctgtgcaccggcaatggccacggacctggtcctgaccccttgggcacccagcctcaatgccgaggccatggccgtgctgagcagcaccgaacgcctcaccgccagtacccgcaacggcctgcaactgctcgacgccaaaggcaccgaactcgcccgcttcaacggcaacttcagcagcctcgacacccgcgctgccggctcccaggtactgctcgccagcctcgacaacgaccgccagcaagccatgctgatcaacctcgacgcgtccgccaaaacctttggcaaaccgctgtacctgcccacccgtgactacccggtaaacggcctgtgcctctaccgtgacggcgccgccaacctgtttgtgttcctggtgggcgaagagggcaagggtgagcagtggctggtgggcaacggctcgacgctgctcggcgacccccagcgtgtacgcggtttgccgttgccgccgtcggcgcagttctgccaggtggatgacacaacccaacagctggtggtgaatgaagcaaacgtcggctggtgggcctacccggcgcacccggaagccgaggtcgagcgcacgccggtagcgctgttcgacaaccccaagcgtgaagcgggcgccatggcgctcgtgccgggcgggatggtcgccctcgatccgaagacggcccaggtgcacctgttccagcacaccggcacgcgttgggtcgagcaatcgagcctgacgctgccaggcctcaaggaaccggaacaactcagcgtcaacggccagcaactgctggtgcgcgacgacgacaccggcaggctttaccagggcacgctcaactggaaagccaaacccgtgacgaccgaaccggtggtgccggaagtcgctgcggtgcgccagaccgacccggtcggtcgccagggcgatgcggcggacgacccggcgatctggattcaccccgcgcaaccggaaaaaagccgcgtgctcggcaccaacaagaagcagggcctgctggcctacgaccttgacggcaagctgttgcaggaactggcggtgggccgtctcaacaacgtcgacgtacgccccaacttcaagctcggtgcgcagactgtcgacctggccgtggcgagcaatcgcgatcacaacagcctgagcctgttcagcatcgaccgccagagcggcgaactgcgcgaagccggtgaagtaccgacgccgctcaaggagatctacggcatctgcctgttccagcccgccagtggcgagctctacgcgatcgccaacggcaaggacggcaccttcctgcaataccgcctcagcgcgccggatggccgggtgcagggcgagttggtgcgccagttcaaggtcgacagccagcccgagggttgcgtggccgacgaccagcgccagcgcctgtttatcggtgaagaagacgtcggcgtgtgggcagtggatgcccgcgccgaccagccggccacgcttgccagcgtgatcaaggtcggcccgcagttgcacgcggatgtcgagggcctggcgttgtaccagagcaaccagcgcgactacctggtgatctccagccagggcaatgacagctacctggtgctggatgccgagccgccgttcgccagccacggatccttccgcgtcggcctgaatgcggcggccgggatcgacggggcttcggaaaccgatggcctggaagtcaccgccctcaaccttggcgggccgtggagccaaggcatgctggtggtgcaggacgggcgcaagcgcatgcccgagcagacccagaacttcaagttcgtgccgtgggccgaggtgacccgcgcgctgaaattgccctgagccgtcatcacccggtcatcacttttttatcgaataggagcttcaccatgcacgcgacgatggaacatatgacgatctggggcttgatcagcgacgccagcctgttggtcaaggcggtgatggtcaccttgctgctggcctccttactcagttggtacctgatcatccagcgcgccagtgtgctgcggcgcctggagcgccagttgaatggctttgtgcagcgctttcgtgccgcgcccgacttgcaacccctgtaccgcgacaccgtgcaggcaggcgagggcggtattgcgccgatcttcattgccggggtccaggagtaccagcacctgcacagccatgatccagcggtgctggaaggtgtagagcgcgccttgcaggtggcgatcaccgagcaggaaatcgagttggaaaagggcctgcaattcctcgcaacggtgggttcggtcagcccctacatcggcctgttcggcaccgtatggggcatcatgaattcgttcatcggcctgtcccaggtgcaacaggccaccttgtccaccgtggcgccgggcatcgccgaagcgctgatcgccacggccatcggcctgttcgcggccattccggcggtgatcgcctacaaccgcttcgcggcacgcggccagaccttgctcacccgttactacgccttcggcaatgagctgcaagtacgcctgcaccgcacgctgcgcggcacgtcgagccacctggccgtggccgcctgaacaggagcgatctcatgttagcaaggccgcaacgcaagcacgggcccaaggccgagatgaacgtggtgccctatatcgacgtgatgctggtgctgctggtgatcttcatggttaccgcgccgatgctcacccagggcgtgaagatcgagttgcccaaggtcgccgccgaggcactggccaccgacacccgccagcagatcctcacgctgtcggtgaaggccgatggtggctactactggaacctcggcggtgaactcgacacccaacaccagaccgacagcgccgtgaccctcgacgaaatgggcgccaaggtcatgcaggtggtggcggcgcgcagcgacacccaggtgtacatccgcgccgacgataacgccggttatggccgtgtggtcgcggccatggcggtgttgcagaagggcggggtgagcaacctggggctggtgaccgaggccccgcaatgacggcgatgatcatgcacagtccgacgctgacgatgccttcccgggggccttccgggttctggcgaaacagcttggcggccagcctggcggtggcgctgcatgtgggcgtgctggctgcgctgatgcttggctggtcgacggaaaaaccgccggtggaagcccccagggtgatgcatacccagttggtgatgctgccggctgcacctgcgccggctcccgcacctgaaccggtggctgtcacgcccccggaaccggtcgcggttcccgtaccggtgaagcccacggtcgatccgcagatccaggcgcgcaaactcgaacaggccgccttggcgcgcaagcgcgtcgaggaaaagcagcgggagcagcaacagcaacggttggccactgaacagcgcaaccgtgagcaggcacaacagcgtgctgaccagcagcgccaggtcgctgaaacagcaagagctgcaacacccgctgcggcgccggcgttcgacagccgccagtaccagcccttgagcaaggaggcgccggactaccccgagcgcgccctggacaagcacatcgaaggcgattgttcggtggaatacaccgtcaacacccagggccgcgtggaaaaccccagggtgctggacggctgccacccgctgttcatgcggccttcactggcggcggcgaataccttccgctaccagcccaggatcgtcgatggcaaggcggtgccggtgccggcggtgcgcaataccttccactaccgcatccagtagccggcgatcaattggcacggttgtacagctcaacactggcaacataccgctgcaggttcgccaggaacgtatcggcaatttcctccttgctctgggtggaaattgccgaggtatgcggcgacagcctaacccgcggacgggtgtacaacgcatgcccgtccggcagcggctccggctcggtcacatccagcgacgccaagccaacctgcccattgtccagcgcctccagcaatgcttcctgatccagcaagccaccgcgtgcgatgctgatcaggtgcaaacccggccaggcgctggcggagcacctcgttgtaatcctcgtccagctggctggcgataaccacctggctcatgtgcgctccttgtggcgttgggcgaaggcagccttgccgacaccttgtaataccgcgtcgttctgcggggtatgcacgcggctgcacagcacgtcgcggtagtgccgttgcagcgggctatggcgcgacaggcccgggttgcccgaggcctcgatggccagctccacggcacggatcgcgttgttggttaccaggtacttcaattgcgcggcgttggcggccggggtgtggccttcggcagcagcgtcgagcaggctgcgattggcaaacagcagggtgtcgatatggccgacggtttcctggaaacgcggcagggtcgacagcgccgcaccgagattggacggttggcgctcctccagccagttcaccagccagtcccgggcggcctgggccacggcgtcatacaccgacgacagcagcaccgacatccacaggaaaccctcggggtccaattctggcgacggcgcactccacgggctgacgctgacggcgtggtccagcggcaccagcacgttgtcgagcaccacttcatggctacaggtggcgcgcatgcccaggtggtcccaggtgtcgatgatactcacgccggggctgtccttgggcaccagccaggcgcccaccagcgggtcggcgtcgtcactgcggccccacacgctgaaccagctcaggccgtggctgccggtggagtagatcttgcgtccgctgatgcgccagccctcggcggtgcgcacggcggtggtcgccggcagcccgccacgggccggggtgccgaggtcgggctcgacgcgcagggcgttgatcaatgcgccgttgcgcaccgcgtcttcggccacttgcctgcgcaggtgcgcgggccaggtcttgctgtcttgcaggcgggtgtgttgcaggtactgcatcaccaggatcagtgcggtggacggctcgcccttggcaatcgcactgatcgccttgcgtgcctgggacaggctggccccgccgccgcccagcgccttgggcacggtgagggcgagcaggccgtgttcgtgcagcaacttgaagttggcgtgagggaaagcgccgctctcgtcgtagacttgcgcggtactggcgaactcggtggtgagacgttcgagcagggcgtcgaactgggcgacttccacggagcgcaaggagggctgcgaggatgggctcatgccagcgcctcttgctgcgcttcaacctcggcggcgacgctgtagcggttcaccggcacgtccaggccgaggttgtcacgcagggtctggccgctgtattcgctgcggaacaggccgcgctgttgcaacaccggcaccaccagttcggtgaagtactgcaagccatccggcagcaccgagttgatgatgaaaccgtcactggcgccgtgctcgaaccaggtctggatcgcgtcggcgacctgttccggggtgccgacgaaatcgcgcttgggtcgcgagaaacgcagggccacttcgcgcagggtcaggccttcgtccctggccagttgcttgatgcggtcggagccgcctttctggctgttggaccccaggtcccccagttccgggaacggcgcgtcgagcgggtattggctgaaatcgtggtcgttgaacgggcgaccgagggcgacgatggcatcttccacggtgaccagctccacggcctgctggtagcgactttccacttcagcttcatcgcggccgacaatcgggcggatgcccggcaggatcgacaggttttgcgggtcgcggccaaagcctttggcgcggcgtttcaggtcttgggtatacgccaggccctcctcgatgctgtccacgtgcacaaagatcgcatccgacttctgcgccgcgaagttgcgcccgtcctccgaggtgccggcctggaaaatcaccggttggccctggcgcgaacgcgcgatgttcagcgggcctttgaccgagaagaagtcgcccttgtggttgagtgcatgcagcttgcccggggcgaaaaattcgccggactgtttgttgtaggtaaaggcgtcgtcttcccacgaatcccacaggccctgcacggtgcttacgtgttccttagcgatgcggtaacgcacagcgtggggcgggtgctcggccttgctgaagttgtcggcggtgccgctgagccatgaggtgaccacgttccagccggcacgaccgccgctgatatggtccagggacgcgaactggcgcgccacctggtagggctcggtgtagctgacggtcaccgtggcgacgaggccgatatgtgtggtgatggcggcgagtgccgacaggatagtcagcggttcgaaacggttgaggtagtgcgggctggacttggcgtggatgtgcaggctgtcggcgatgaacacgaagtcgaacttggcggcttcggccaattcagtctgctgcttgtagaagccgaagctggtgctggcatttggttgggcctgcgggtggcgccattcgccccagccgtgaccgacgccatggaccatggctcccagtttcaaatgacgtggcttgctcatgtgctgctccttttagcgcgaggcttggttgaaggggacacgcttggcgttgaagctcttgtcgaagccctgcgacacgtcgatgtgcttgagcagcaggccttcctgttgataggtgtcggcggtcgcttgcaggccgctgatcactgcgtcgtcgatcgtgaccgggttcaggcgggtgtccttggctaccgtcacgtgcacgtccagcggcaggccggtgatcctggcctgggcggcggcgtattcatcggggtgggtattggcccaggcataggcgcggtcaacgcgggcgacaaagtcgtcgagctgcgggcgcttgtcggcgatggcctggctggtggcggcgaggtacaggtggttgctcaacagttggttgccgctgatcagcacgcgggcctggctttgcgaggtgaccacggtggtgtacgggtcccaggtggcccaggcatcggcggtgccgttatccagcaccaggcgtgattcgctgggcagcaggaaaatgaactgcacatccttggtcgtcaggccggcggtggccagggccttgatcgccaggtaatggccgatggaaccgcgcccggtgacgatcttcttgcccttgaggtcggcaacggtcttgatcggcgagtccttgggcacgaccagggcggtggtggtgcgcccttcggagtggatgatgctgaccaccttgagggaagcaccggcaccgagggcgaacacgtacggcgcatcaccgagggcgccgatgtccacggcaccggcgttgagtgcttcgcccaacggtgaggcagatgggaattccgaccactggattgtgtaaggcacgttttggctttcgccagaggcttccagtagcgccttgattgtcgatttctggtttgccacccgcagcggttgcaggtcggcggcagcggcgctgccgatcaggccaagggcgagggcggtgcccaggagcaggcgtttgaaagggcggttgtcgagcatggggcaaactccaggcgtttggtgtctttcaagggatacctccgcctggagaaggggtcggattccatcgcatgtacggggtgggtcagatcacatggaaaccgtgggtgccgtcgcgtgccaactggtcgaccaggccgaattcccagtccaaataggcttgcatggcttccctggggttgtcggtgccttcgtacgggcggcggtagcggtcgatacgcggcgaggccaggtgggtttcgcctgcttccagcggcagttgcgcgttgatccagccggcagtgccgtcctgcagcaggaacacctgcttgccggtgagggtttcgacttcagccaccgccaggcgcgccagttggctgctgccgcaggtcagcacgtaacgctgggcggcgggcaccttggccagggcctcggcgagttgtgcacgcagtacccaccaggctccggggatatggcgcttcacgtagttggcgctggcggtgaaatccagcaccacagtgtcgccgtgggagagccagtcgacgagggtatgggggctgatcagttcggcctggggcggcgccggtaccggcgcgacccaggcgccttgctcgctgaagtgcgccgcttgcaggtcatccagcacgtgcacttcccagcccaactgggccagccaggacgcggacatgtttgcgcgcacaccgtcgtcatctgccagtaccagccgggcaccgcgcacgctggcgaagtgatcggtttcctgcaccagttgcccgcccggtgtggagcgtgcgcccggcaagtgcccggcttcgaattcttccggggtgcgcacatcgaacaggtaggtggtgcgtgtggtttgctgctgccaggtgcgcaggtcgctcagggtggcacggccaacgcgggccttgtcggcgacacgccgcgcatccacggctgcgatctggcggtgctcctcggaggtcggcgcaaaacgccgcgattggccatgggcaagcttctgcccggccagggtccagccgatggtgccgttacgcagggccgacaccgggttggcaacgccggcattgatcagcgattgggtgccgataatgctgcgggtacgcccggcgcagttgacgatgatgcgggtggccgggtccggcgccagttcgcgggcgcgcaacaccagttcggcccccggcacgctgatgccggtgggaatgctcatggtctggtattcgtcgaaacgccgggcgtcgagcaccactacgtcggcctggctgtcgagcagcgcctgcacctcttcagcggccagggacggcgtatggcgttcgctttccaccagttcgccgaacgccttgctcggtacgttgacgtcgatgaacagctcgccaccggccttgcgccaaccgtccaggccgccttcaagcaggctgacctgggtgtagcccaaggcaaccaggcgttcggcagcgcgggcagccaggccttcaccattgtcatacacggtgacctgggtatcgcgccgcggaatgcgcgcatacacctccagttccagcttggacagcgggatgttcgcggcaaacagtggatgggattcggcgaacggcgcttcttcgcgcacatcgatcagggcgacttcttcttggtccaacagggcttggcgaatccgcgcaaagctgcgggtggagagggtggtcatagggcagggctcttttctttggacaaatcccagatattcgggaggaaggcgttggaataaccggagataaacagtttctcgctgccatcgggctggtacaccgcgcggcgcaccgcaccgatattggcgccgtacacatggatgctgatggacacctggtcgctgtgggcgttgctcacctgatggatgtcaccgaccctgggcgacaccgcttcaacctggcccggcaccagctggatcggcttgccttcggccaccaggcggccgtcaggggcgcgttcaaacccttgggaaaactctgagccgcgcagcatgccaatcaggccccacacccggtggtcatggatgggtgtgctttgccccggcccccacacaaagctgacgatgctgaaacgctggcgtgagtcggcatgcagcaggaactgctggtagcgttcgtgatcgggttgggcgaattcgtcgggaagccagtcgtcatggctgaccagttgcgccagcagcttgccgccacggtgtagcaggtcgccttcgcgtgggttgccgtcgatcaattccgccagggcgcctatgaaggctctgagtctctcggggtgtcgggcctgggtcatgacagttccatcgtgcggtcggtggtgatgggtttatctaagcataatgttaatagttaatatgctattttttaatgattagcttatagctgaaggtaatttagaactggtctgaatagcgttagacgttatcgatcacagcgcgggctattcaggcagctttcctgcaactatgcttcgcacacatcttaatgacggttctctatgtgcggcccaaatgaaaattgacgatatcgatgcctttgtcgaagtgattcgttgccagtccatcagccacgccgccgagtcgttgcaactgacccagccggccattacccgtcgcgtgcagaacttcgagcaggcgttgggggtggagttgttcgaccgcaacaccaaacccctcaagcccacgctgatcggcacccgcgtctacgagcagtgccgcttgatcctgcgcgagatggacgccttgcgcgaactggtggccaccgatgcaccacccactggcctgttgcgcctgggggtgccgcagaccatcggcgatgtggtgttgctggatgcgctcaagcacctgcgcaccgaataccctgacctgcgcgcccaggtcgctacggggtggggcagccaactggtgggcaaaatcgaacgcggtgagctggatgcggcggcggcgctgttcccggcgggcaagatcttcccggacaacatcgtcggcgagtccatcggcaagatggaactggtggtggtgtgcgccaaggcccagttgccgaagaaaccttgcaagctggcggatgtgtaccagaacggctggattctcaacccggacggctgcggcttccgtgcgggcttgcagcggaccttgtccgatcagggccttgcgctgcgggtcaacctggaaaccttcggcaccgagctgcaattgggcctggtggcggacggcctgggcctggggctggtgccgcgcccactgctggaacgcagcgcccatcgcgagcacctggcggtgatgccgctcaaggacttcaagccggtgatggacctgtggctgatctacccgcacttcctgggcaacctgcaagggccggtggatgcgtttggcaagctggtggctgcctcgttgcacaggatcaaggacgctgcctgatatgaaaaaaaataataattagcttagattaaaatgtgctttttattatttttttgcatcccctaggcttgcctggaagtccttaaggccatccaggaagttttgccatgagtagcgtcaccccgatttccagcgtttccagcaacaccgtccgccaacgcgttactccgcaagaatgggacgtgcgcgtcaagctggccgccgcctatcgcctggcggccttgtacaaatggaccgaccatatctatacccacttctccgcccgcgtgccggggccggaggagcatttcctgatcaacgccttcggcttgctgttcgatgaaatcagtgcgtccaacctggtcaaagtcgacctcgacggcaccatcgtggatgacccgacgggcctgggcatcaactacgccggctatgtgatccacagcgccatccacggcgcgcgtcacgacctgcaagcggtgctgcatacccatacccgcgacggcatcgcggtgtcggcgcaaaaagacggcttgttgccgatctcccagcattccatcggtttttccgggcgcgtggcctatcacggttatgaagggattgccctcgaccttgacgagcgcgagcgcttggtcgcggacctgggcgacaaaagcgtgatgatcctgcgcaatcatgggttgttgaccgcgggggtcagcgtggagcatgcgtttcagcaactgcagcaacttgagcgggcctgcaatatccaggtcgcagcgcaggcagcggggaatgcggagttgatcttcccgccgcaggaagtggtggagaaagtcgagcaacaggccaaggcgcacgccagcggcgaaggtccgggcgtggcgcggcattggaatgcgctgatccggcagttggagcgcagcgataccgactacaaaaactgagcttaatgtgggagggggcaagcctcctcccacattggtttttgtgttgtgctcaggcgacttgtttggcctgttcgcgttgtgcgatcagttggcgggtgagggggatcaggcgcttgccgtagtcaatcgcatcattcagcggatcaaatccacgaatcaggaacgtggtgatccccaggtcgtaataatccaccaaggcctccgcgacctgctctgcggtgccgaccagcgaggtggagttgccctgtgcaccgagcaacccggcaattccggtccacaagcgcttatccaggcgtgagccttgcgccgctgcagcgagcaagcggcgcgagccttcgttgggcggttcacgccgtacaaagccatttttctcggccagctcggtggcttgctgcaagatcctgtcggcccgtgcccacgccagctcttcggtctcggcgaggatcggccgcaacgacaagctgaagcgaatcgtgcgcccatgcctggctgcttcggcgcgtacctgggtgacgatctcgcgcacctgctcgtaggtttcgccccacagcgcatacacgtcggcatgcttgcccgccacttcaatcgccgctttggacgagccgccgaaatacagcgggatatgcggctgctgtggcgacttcaccgtggagtacgcaccttcgacctgatagtaggtgcccttgaagtcgaagggctgctcgctggtccattcctggcgcaccacgctcaggtattcgtcggtgcgggcgtagcgttcgtccttgccgatatggctgccatcggcgcgcagttcacggtcgtcgccgccggtgatgatgtgcaccgctgtacgcccgccgttgaacacatcgagggtggtgaattggcgcgcggccagggtgggctgggcgaaaccggggcggtgggcgatgagaaattgcagtctggtggtcacgctggcggcgtgggaggcgatcagcgtgctgtccgggctgttggagtggaaggccaccagggcgcggtcgaaaccggcgtcttcgtgggcgcgggcaacgctctcgacgtagtcgggttgcagggtagggccgctgcgcggatggatctcggaagcgtgatggccgccaatgtagccgatgaattcgatgctcatggtctgtccttgtcttgggtgtgattaccacctccaccgggcagggggtcggttattcgcgtccaaagtaggggcaggggcggggtctgtaaaatgccgattggttctaacctaattattaaaatgtggaattattaaattggctgtgtatcagtaaattgcatttttagaatgccagggcgaatcacccgctggcttttcatgtgccgaggctgactttagataacgttgtattttccctggcactgaggtctgatgggcgccgaaacgggcttgccggattggggaactatgcgggcagaacttgcgcaatatggcggcattaccgtcatgattccggccgctatcatcatcgccgtgtggttgcggtattccaaccctcgggcactgagggcctggatcataacggttggtgtggcttattcagtggtcgcgctcagcaagttgctgttcaagggctggggcctgtcatttcagcacttggacattgccgtcatcagcggccatgccatgaatacctgcctgatgcttaccgtggcgctgagcctggtggcccgccagttcaatccggcattgcgctggccggcggcaggtgcggggttactcgccagtgcctggtttggtgcttactgtgttgcgccgtacatacatccactcaatgaagcactggccggtgtcaccgtgggggctgtcgcggcgattgcctttctctggcgcattgagaccacccacgtcagggtgtccccttcgttcatcggcggtgggctggtggtgttgctggcctgcacactggtgcccaagttcaatgccgagttgctgctcaaccgggttgccatcaccttgtcgggtgccgaccaggcccatcaagcgccttcctggcggctggatgcggcacacacaaaggccgagtaagtcaccaggtccagcgcccggtggctgtccaccatcagttccagcaacaccgtctgcgcattgaaacgccgcatatcgccgcgccgccgtgcctcgttcatctgcttgagcagcgtatgggtgatctgctgcggtgagctgccgtgcagttgctccagccaacggccgatggcctgggtattgcgccggtattgggtacccactggcggcttggcgaaaccttcgaacatcccggtgagtcttctcagcgcatagctgcgtatcacgtcatccaacaggctcatggccgctcctcagtgccgcagatgttcgccagcagctcggcggtcttgaccagcatgaactggctgtcaccgcgactttccacgcacaggcacaccgacagcgcatcactcacctgcaacttgaagcgccaatcggcgaacaccatcgacagtccggaacaggattcatcgctgtccagggaattgtcgcggtataacacctgcatgcgctcgacgacgcgggtcgagttattcacttcgacatgaatatttcccgaagaaggaaataggccaatacgctctaccaataactttgacatgttcatggccgtctcttcgttgttgcggtcaggcggcactttattctgtgggagggcaaaagtactggaatgttatttttagtcggttatgccgggtgttgttatttttagtctgcctcggcaggtggtcgaagtaccgcggttgtgatcataatcgcctcgctgcttgaagtaaggtcatcccttttactaccgggttaatacagtcggcgcgtgggaggttgccttgttcaataggattttgattgtgtgtgtcggcaatatttgtcgcagccccacggcagaacaattactgcgcaatgcgctggcgcactccgcgatagaagtgagttctgcggggttggccgcattgcgtgacagcccgctggagcccacggctctgcgggtgctggaagagcacgggcatgcaccggcttcacacagggcacgtcaactgacaagcgctgcggtgagtgacgcggatcttgtactcgtgatggagcaacggcatatcgacggggtactcagcctcgcgccggaagcacggggcaaagtgttcctgctaggtaaatggcaatacaaccgcgagatcatggacccttatcgtcaaggcaaaccagcctttgttcatgcctatgcgttgatagaacaagcggctcaggcgtgggcgcaaaggttagtcggtaaagttggttaaaagtcgtcatgtaacacacttgataagttctgcgttaatcgtgcatggagccgggcgtcttgcaccctgtgccattccttgactattggttggaaaaaagaactgacttatgcaatcaacacccgcaacagcgtcgcataacggcgaagaaactgatctggatttcatgatgttgttgggcacgttgctcgatcacaaatggctgatcggtggcatcagtatcgtctttatggcgctgggcgtggcctatgccgtgttgacgcctccggtctatcaagccaccgcactgattcaggtcgaaccgaaaaaaggcgacatgctcggcttttccgatgtcggcagcctgctcggcaaggagtcgcccacggtcacggaggtcgagttgatccgctcacggatcaccgttggcactgccgtcgacaacctgaacctggacctcgaagtgaagcccaagcgcttccccttgatcggtgatttcatggcgcgtcgcttcaagccagcgcaagcccatgaggtggcgaacccctggctcggcctcgacagttacggttggggtggcgaggccctgaagttttcgcggttgcgccttccggctgacttgctgggccaggaactgaccttgactgccggtagtggcagcacctttaccctgtcggaccaggaccaaaacgtgttgctgacggggcaggttggtcgcttctatgaaagcagcggcctccaactgcaggtcgaaacgctggatgccaaccctggcgcgcaattcagcgttgtgcgttcgccacgcctcaccagcattctgcgctatcagaagctgctggatgtggcagagcgcggcaaggagtcggggatcattggcctggcgctggaaagcacgcggcccgaggcggccattcaggtactcaatgaggtcgcccgtatctacgtgcgccagaacatcgagcgcacctccgccgaggcggcccagagcctggccttcctcaaagaccaattgccccaggtgcgcaaggatgtcgagcaggctgagacggcgctgaaccagtttcagatccgcaacaaaaccatcgacatcagccttgaggccaaggccattcttgaccagatcgtggcgctggatgcgagcatttccgagctcaagatgcagcaggcagagatcgagcgaaagttcaccccccagcacccggtgtaccgcgcgctcctgacgcaactggcagaactcacggcccgtcagagcgagctggccaagaaggtcgaaagcctgccgaccacccagcaagagttgctgagcctgacccgcgacctcaaggtcagcaccgagatctacacgcaattgctcaacaagtatcaggagttggatgtgatgcgcgccggcaccgtcggtaacgtgcgcttgatcgataccgccgatgtcgacctgaggaacccggtcaggccgcaaaaagcattgatcgtggtgatcgccacgctgctcggtgcctttgttgcagtcgcgctggtgctgtttcgcaaggcgctcaatcggggcgtgtccaaccccaacgagttggaaaaactcggtttgccggtgtatgcggccatcccgttcagtgccattcagaaggacatggaccagaagctctttcgcagcaacaagttgggctccacacagttgctggccctcagcaacccaacggacctggccattgaagggctgcgcagcctgcgcacgagtctgcatttcgccatgttggaagcgggcaacaaccgcttgatgatctccgggccgagcccgcaggtgggcaagacattcgtctcggcgaacctggccgctgtggtcgcgcattcggggcagcgtgtgttgttggtggacgtggacatgcgcaagggttacttgcacaaagtctttggcgttgcggcagaaaacggtctgtccgacctgctcgccaaacgctgcgagctcaccactgcgatccatcccacggaggtcgagaaccttcacgtccttagccgtgggcggatcccgccgaacccatcggaactgctgatgcacgccaacttcagcgaattcctggaacaggtcagcgcgctgtacgacctggtgattctggatacaccgccattcctggcggtcaccgatgcaaccatcgtcgggcggcagtccggcaccaatctgatcgtggcccgtttcgagttgaactctgtgcgcgaggtggagctgacgatgcgtcgctatcaacagaacggcattgaactcaaaggcgcaattttcaacggtatcgagaagcgctcatccgccaaatacggatacggcgcctacagctattaccactacgagtacaagtcagacagcgtttgatcctggacgccaggcatttgaagtccaacgcgcaacacgtctaccactggccgcaggttcaacgagaaacgctatgaaagtcacagtttttggcattggttatgtagggctggtccagggcgccgtccttgctgaagtcggccacgatgtgctgtgtgtcgatattgatgcgcagcgggttgagcgtctcaaacaggggcatatcccgatctacgaaccgggcctggaggcgcttgtcagggaaaaccatggggccggccgcttgaatttcaccaccgacgccgtggctgcagtcaagcatggcgaagtgcagtttatcgcggtggggacaccgcctgatgaagacggctcggccgacttgaagtacgtgctggcggtggccgagaccattgggcagcacatgctggccccgctgaccatcatcgacaaatccaccgttcccgtgggcaccgccgacaaagtcagtgcacgggtggctgccatgctcgcgctgcgcgagcgcaccgacctggccttcgacgtggtgtccaacccggagtttctcaaggaaggctgcgcggtggcggactgcatccgtccggaccgcattgtcatcggcaccgccagccggcatgcggaggcggtgatgcgcgagctctacgcgccgttcaaccgcaaccacgaaaaaatcatcgtgatggatgtgcgcagcgccgagttgaccaaatacgctgccaattgcctgctcgccaccaagatcagcttcatgaacgagatggccaacctggccgagcgactgggggccgacatcgagatggtgcgccagggcatcgggtccgatccgcgtatcggctatcactttctgtatgcaggcgtggggtatggcgggtcgtgtttccccaaggatgtccaggccttgatccagaccgccgagaccctcgacttcgatgccacgctgctcaaggccgtggaacgacgcaatgccgaacagaaaaacagcctgttcaacaaactgtccacgcatttcaacgcgcaactggcgggcaagaccttcgcgctctgggggctcagtttcaaacccaataccgatgacatgcgcgaagcccccagccgcgtgttgatggaggccttgtggcgtgccggggcaaacgtgcaggcctttgatccggaatcgatggaagaaacccagcgtctctatggcgaccgcgaagacctgcgcctgtgcggcaccaaggaagcctgcctgaaaggcgccgatgccttgctgatcgtcacggagtggcaggtcttcaaggcaccggacttcacggtgatcaaacagcagctcaagcaaccgctgatctttgacggacgcaacctgttcgaccccgtcagtgtgcagaagaaaggtattcactacgtatccgttgggcgacctctcaacccggtataggtcttcccatgagtgtgcttaaaagaatcgtcagcggcattggcgccaattcgtttggccaggtggtaaacctgctgatccaggtggtgagtgtgccggtgctgattgccagttggggctttggcgcctacagcgaatgggtggtgctgtctgcgattccaacctacctggcgctgtctgacctgggcgtgaccacggcggcatcgagcaaggtcgtgatctggcacgagcgcggacggttgaaggtcgcgagtgcggtgtacagcaccagctttgcgtttctatccctggcgggactcagtgtgctgttgctgaccctgggcgccctggcgttgtttgacctgttcagcgtgctcaacctccagtcgatcaagagcggcgacggggtgctgattctctcggcgctgaccggctactcgctgctttgcctgtttaccaacatgatttcgatccgctaccgggccaataaggccttgccgttgtcggcattcatcatgaacgtcatccgcatgctggaatggtcggccgcgttgctgtgcgcttacctgagccacagcctggtcgccaccagcctggtgctgttggccgtgcgcgcgacgggcatcgtcagcaagaaccagatcgccaatcggttggggatcgccttgcgtttcaacctttctgcgatcggcaggcgggcatttgtgacattgatcaaaccgtcgctggcttcgctggcctttccgattggcctggcgttgaacgtgcaggggctgatcattctgttgtcggtgctgctgtctccggcgcacgcggcgatattcggtttgtaccggaccatttccagggtgttggtgcagttctcgaccgtggtgaaccaatccctgtggccggagatttcctatgcgttctctatcggtgacaaccaactggtccgcaagatgctccgctacgccttgcggttctcgctgcccatcgcctgtgtgctgggcgcgctggtggtgatattcggcgggacgatcttcgatgtgtggtcgggccgcaaagacgattattcctccagcatcatgctggtgctgatcatcggcgcgctgacccacgtggcttggcaggtgtattgggtggcaatgatggccacggcgtcctattcgtcgtttgccgtggtgttcatgttggtgtcaatcgccagcattctggcggtgttctgcctggcacaagactatggcttgctcggcgtctgctacgtgctggtggccaccgaagtcgtcctgttctgttttgccaggcgcggtttccatcatcttgaactgaggatggcccgtgctgattaatcacctgatccgccatcgattgaaaatcagcctgctgacgcctgaggggctcaagtacctggccaagcgcgtgctgttgctgggccgcttgctcaaggccgatcgccgccaacgcatgttgcgccgacagggggccagcctggctccgctggtgatgatcaatgccgtggaattcgaaggctccgtcgcgtgtttcagcgtgggcaccggcagctttatcggcaagcgcacctttatccaattgcacgccgccgtccgtgtgggcgcccatgtggcgatcaatgaaggcgtgcgtattctcacgggtacccatggcctggatgatcctgcctggcgcttgaaagtcgccccggtggtgatcggcgactacgcctgggtcgccactgacgcgatcatcctgccgggcgtgacgatcggtgaaggtgccgtcgtcggtgccggcagtgtggtcgggcgcaatgtggaaccgtacagcgtggtggcgggcaatccggcacgggtcatcaggtcgcgtgctgcgcatgcgtttacctacagcccggtccgctcaagtgccgtcgtcgaagcctggatgggtaaataagatgattctggtcgctcatcccgttggtaatcagaatgtccgcgcgttgctgcgcgcgttgaatcaacggcagttgctgcactcgttccatacctcgctggcactgcataaggagtcgttcctctgccgtctgccggtggtgggcaaggagtgcctgcggcgtacgttcgatcaggtcgatggcgcgttgctgcacagttacccgcgttatgacgtgccgcgtgtgatctgcgacaaactgaggtggtatcgcctgacacggcgcaacaccggcatcttctgcccggaaaacgtctaccaccacattgaccaggccagcgccggtttcctttacaagaccccgcgcaaacccagccaggtgtacggctatgacggcaagtgcctgggcttgttcagcgccgcccgcgacatcggcgacatcaccctcaattatgaggcggccttcggctccatcgcctacgcctgcaggatgcttgagcatgagcgcgaggccaaccctgcctggcgtgccagcattcccaatatcagcgatgacaccgtgcgcaaacagacggccgagttggccttggcggaccggatcatagtggcgagtacctttgccaagcgcaccctgggtgagcacggcgttgcgccaggcaaggttgcgatcacgccctatggcgcgccggcgccgatggtgcgtcatgaagcaagcgcccggccaggtgcacgattgaaagtgatttatgtcggcgcgctgacccagcaaaagggcatttcgtactttttcgacgcgttgaaccttgcggcgagcagcgttgccctggacgtcacggtgatcggtggcgactacgccaacggtcgcaaccccgtgctcaatgccgagctgaaaaagtaccagtggtttagctccgcgtcccacgatgacgttatccgccacttgatggaggccgatgtgctggtgctgccgtcggtcgccgaggcgtttggcctggtggtgggtgaagccttgtccacgggcacagcggtgatcgtgtcgcagaactgcggggcggccgacctggtcgtcgagggtttcaacggttatgtggtgccgatccgctctgccgaagcgatcgccagccgtctggttgagctggccgaagacaaggacaagctcagtgcgttgcagcacaacgctgtgttgtctgccggtggaaccacctgggacagctacgccagggaggtgatggatgcaatccttggccattcctgacagggtcagcctgcatgagcgctaccgcacgcgggtggtcagcgccttcgtgcttatctacctgttcatcctgttcgaagggatcttgcgcaagtgggtgatgccgagcctcagttcggtcatctatttcatcaaggacccgattgttctttatatctactggtgcgcctaccggttcgggtttttctcgaaaaacctggtgtcggcctactttgtcgtgctggtcatggtgttcttcctgctggtggcagcgtttttgttgagcagccctgaaggcttcgtcatctacggctacggcgtgcgcaactacctgctgtatttcccgttgatatttgttgctggcaagacgctcaggttgacggacgtctatcggttcgcccgtatcacgctgttcgcggcgatcccgatcagcgtgctggtggtgctgcagtattcgtccggaccccaggcgtatgtgaacaaaggcattggtgatgatgacttcatcttcatgattgccgacggtgtcgtgcgcccctacggcaccttcacgttcaccgccgggcatgtggtgtacgtgtcggcctgctttgcattcctggtcgcggcggtgtttgacaaggccttgttccgtgccgtgttcgcccggcgctacgggctgtttggcgtgtcggcggctgcggtggcggtgatgtgtttcctcacgggctcaagggccatctacgcgtacgctgcgattgtgctgctggcggcgctgatggtcgccttgatcaagaaatcgcaacgcaacctgttgtcgttgtttttcctggcggccgcgctgtttgtcagcctgctgattttcatgtccaccgacagctaccaggtgctggtggagcgcaaccgcagcgcggtggccagtgaaggctcgccggtcactcgcgcgttctccagcctgtatgcgttcacgcgtgtggttgatgacgcgccgttgtggggccacgggataggttcgggcaccaacgccgcctcgacgatcctgcgcgcagggcgggagcagggcgcaggctttttactggccgaagatgaatggtcacgcatcgtgctggaaatgggcctgcccgccgggctgatgttcattctgttccggatcttcgtgctgctctggttactgctcaagtcctacacggcgctggtcaggcaaggcaccggggtgccgttgctgctgtgcggtttcctggcgccgatcctgttcaacggggtcatgaccatgcagggcaccttcctggcgtttggcgtgctgtatgcctgcctgattctcgcggcctgcaagaaaacctgaacctactcaacgcatcagcggacgacagcacgtgaagttactaagaatcatctcttcggtcagaccggaaaaaggcggcccgatcaacgcggcccgggaaatcgacacggtgctcgcccaggagggacatcgcgtggatgtcctgacgctggatgccgagttcgcggtggactatcccggcaccgtgcacttcatggggccaagccgtttcggctacggcttgaacggcaacatccgtcaatggctggagcagcacgcccggcactatgattttttcatcatcaacggcttgtggcagtaccacgggtttgtcgcccgccaagtgctgaacaagttgggccgaccttacatcgtgtatacccacggcatgctggatccctggttcaagcacgaatacccgctcaagcatctgaagaagtggttgtactggccctggggcgaataccgggtgctgagggatgcgcggcgcgtggtgttcaccagtgaagaagagcaaatccgtgcgcgagagtcgttctggctgtatcgcgcccatgaaacgatcacggcgtatggcactgccagcccaccggccgatggggcgcgcctggcacacgacttcatcaccgaccacccggaactcaagggcaagcgggtggtgctgttcctgagtcgcatccataagaaaaagggctgtgaccacctgctgcaggcatttgcccaggtcgccgggcaagacgagcggctgcacctggtcatggccggccccgatcaaggcggctgggtacaagcattgcaggatcaggccgaaaagtcgggcatcgcccatcgcatcagctggcccggcatgttgcaaggtgcggcgaagtggggcgcgttctacgccgccgaagtgttttgcctgccttcgcaccaggaaaatttcggcgtggtggtggcggaagcgctggcgtgcggcaagcccgtgctgatcagcaacaaggtcaatatctggcgtgaaatcgacaaggatcgcgtgggctttgtcagtgacgacaccgctgacggcgccctgcacaacctgcaacgctggttgcagctggaggcgcccgcttacgcgcaaatgtccgagcgggccagggcgtgctttgccgaacgctttcatatccgtcgcggtgcgcagcgcttgctggagattgtgcgggagtgcttcccgtgattcttcaaggcaatgacccgcaccgttcggcctcgttctcattgggccatcggttgcgccgccagctctggaacatggtgtacgtggtgctgtttcgcaccagcccgcgcccgctccatgcgtggagggcctttctgctgcggctgttcggtgcgcggttgggcaaaggggtgcacgtgtatccacgggccaaggtctgggcgccctggaacctggagctgggtgaccatgtcggcattgccgatggcaccacgctgtacagcatggcgttgatccgcatcgggcgctacagcgtggtttcccagggcgcgcatttgtgcggcggctcccacgactacaacagcaagaacttccagctgtatgcaaaacccatcgtgctgggggagcacgtgtgggtgtgtgccgaggcgttcatcaccccgggcgtcagtgtggctgacggcgtggtggtgggtgcccgcgccctggtgatcaagaacatcgcgcagccgtggaccgtgcatgcagggcatccgtcccgccagatcggcctgcgtacccagcatgtgcaggagcccacgccatgaagcgcgaaaccatcagcgtgatcatcctcacctacaacgaaagcctgcacatcgcccgggccatcgactcggtgcgggccttcagcgatgaagtgctggtggtggactcattctccaccgacagcacctgcgacatcgcccgtgcccacggcgcgtgggtggtgcagcacccgttcgtcaaccaggccaagcagttccagtgggcgctggacaacctgccgatcaccggcaactggacgctgcgcctggatgccgacgagatcatcgaggctgacctcgctgccgagatcaacgcacgcttgccgacgttggccagcgatatcaccggcatcaacttcaagcgcaagcacattttcatggggcgctgggtgcggcacggcgggcgttacccgttgaggatgctgcggctgtggcgcaccgggctcgggcgcatggaagaccgctggatggacgagcacatctcggtggccgagggtcgcaccatcaccctggaaggtgggttcgccgaccataacttgcatgacttgaccttcttcacccacaagcacaaccagtacgccacccgcgaagcgattgaagtgctcaacacgcggctggggttgtttgcgatccgcgatgaactgcacacggggcagagttcgttccaggccaaggccaagcgcctgatcaagaaccgcctttataaccgcgtgccgttcaccctgagttccaccgcctatttcttgtggcgctacatcatccagctggggtttctcgatggccgcagcggcctggtctatcacctgctccagggctattggtaccgcttcctggtgggcgccaaggtgctggagctggaaaccgcaattgcccatttaaacgataaggaagccattgtccgggaactctcgaagttgaccggccataacttgaacctgcccaaacagaagtaactgaccgtttttaacaaacacccaagtttgggtgtcggccttcgctcgcctatcaatcgggagacagacatgaacaaagttgcgcttatcaccggtattaccggccaggatggctcgtacctggcggaactgctgctggaaaaaggctatacggtgcacggcctcaagcgacgttcgtcgtcgttcaatacccagcgcatcgatcatatttaccaggacccgcaggccctgcataaaaacctgatcctgcactacggcgacctggcggactcgtcgaacctgacgcgcatcatccagcagatccagcccgatgaaatctacaacctcggcgcgcaatcccatgtggcggtgagcttcgattcaccggaatacaccgccgatgtggacgccctgggcgccttgcgcatccttgaagcgatccgcctgttgggcctggaaaagaagacccgtttctaccaggcctcgacctccgagttgtatggcttggtgcaggaaaccccgcagaaggaaaccacgcccttctacccgcgctcgccctatgcggtagccaagttgtacgcctactggatcaccgtgaacttccgtgaggcctatggcctgtatgcctgcaacggcatcctgttcaaccacgagtcgccgcgccgtggggaaaccttcgtgacgcgcaagatcacccgcgccctgaccaacattgcgttgggtctggagccgtgcctgtacatgggcaacatggatgccctgcgcgactgggggcatgccaaggactatgtgcgcatgcagtggatgatgttgcagcaggacagcccgcaagatttcgtgatcgccacgggtgtgcagtattcggtgcgtgacttcattcgctggtcggcggcggagctcgggctacgcctgcgctttgtgggtgaaggcgtggaggaggtggcggtggtcgagcacatcgatggcgacctggcgccgggcattctggtgggcgatgtgattgtccgggtggacccgcgttacttccgcccggccgaggtggagacgctgctgggcgacccgtccaaggccaagcgtgtgctcggttgggtgcctgaaatcagtgcgcaggcgatgtgtgcggagatggtccgcgaagacctcaagatcgcccagcgccacgccttgttgcgcctgcacgggcatgacgcaccgattgcggtggagaactgaacatggcgcgtgatcttgatgcgcggatttttgtcgccggccatcgtggcatggtcggttcggccatcctgcggctcctgtgggcgttgggctacacgcagatactcacggcgggccgcgatgaactggacctgctcgacccggcggccgtgcaggcatacttcgccaggcaccgtatcgaccaggtgtacctggcggccgccaaggtgggtgggatttatgccaacgccacatacccggccgacttcatctaccagaacctgatgatccaggccaatgtgatccacgctgcccacagccatggcgtgcagcaactgttgttcctcggctcgtcatgcatctacccggtgcatgcgccgcaaccgatgatcgaagcggtgttgctggacggtgcactggaacccaccaacgagccctacgccgtggccaagatcgccgggatcaagctgtgcgaaagctacaaccgccagcacggccgcgattaccgcagtgtgatgccgaccaacctgtatgggccgggcgataactaccatccgcaaaacagccatgtgatcgccgccttgttacggcgcttccacgaagcgacccagcgcggcgatgacgaggtggtgatctggggcagtggccgaccgcgccgggagttcttgcacgtggacgacatggcggcggccagcgtgcatgtgatggaactcgatgcggcgcgctaccgcgaacagacccagccgatgcgctcgcacctgaacgtcggcactggcgtggattgcaccatcgccgagctggccgaggcgctggtgcgggtcaccggtttccaggggcgcctgcgtttcgacgccggcaaacccgacggcgcgccgcgcaagttgctcgatgtcagccgtatcaacgcccttggctgggaagcctacgtgccgctggaggagggcttgcgtgacgcctacaacgcctatctcgcggcgctcgaacagcctcggggccagtgatgaaagtccttttgtacggcatcaattacagcccggagctgaccggtatcggcaagtacagcggtgaacaggcgcgctggctggcggcgcaaggtcatcaggtccgcgtggtcacggcgccgccgtattacccgcagtggcaggtgggcgagggctattcgccgtggcgttttcgcaccgagctggatgccggcgtgacggtgatccgctgtccgctgtacgtcccgcgccagccgacggcgatgacgcgcctgctgcacctgataagtttttccgccagctcgtgtgtggcggtgctggggcaactgcgctggaagccggacctggtgatcctggtggtgcccacgctgttctgtgcgccccaggcgttgctgttggccaagctcactggcgcgcggtcggtgttgcatgtccaggactatgaagtggatgcgatgctcggcctgggcattggcggcggttcgctgttgcggcgcctggcgttgggtgtggagcgctggctgctgcggcgctttgatcgggtctcgacgatttccagcggcatgctccacaaggcacggggcaagggcgtgtacagccagcggttgatgttctttccgaactggtcggagaccgcacgctttcgcgatgtgccgcgcgaccgcgcgttgctgcaacgcctgggcgtgccgccgggaaccaaggtgttgttgtactccggcaacctcggcgagaagcaaggcctggagctgatcctcgatgccgcccaggcccatgcccagcgcacggagtgggtgttcctgatcgtcggccagggcaccggcaaggcgcgtctactcgaacgtgtacagcgtgatgggctgcgcaatgtgctgttcgcgccgttgcaggcctacgaggacttgccggcgctgctggcctcggccgacgtgcacctggtgatccagaagcgcggcgtggcagatgcggtgttgccgtccaagctcaccaatattctggccgtgggcggcaacgcaatcatcaccgccgaccccgataccaccctcggccgcctgtgcgaggaacatcagggcattgcggtgttgatcgagccggaatcggtcacggcactgagcacgggtatcgagcgggcactggcaatgccgacgcgtaatgaggtggcgttgaattacgccaaggagttcctcgacaaggaacgcattctgcaacgttttctggcacaggtttgatgggtatgtggcttgatttaccgaccttccaaacggtcgtggcttcgacgccgttggtggcgatcgacctggtggtgagaaacagccgtggcgaggtcttgctcggtatgcgcgtcaaccggccagcctttggtttctggttcgtgcccggtgggcgtatccgcaagaacgaaagcctcgacagcgcgttccggcgcatcaccggcgaagagctgggacgcacgtttgaacgggccaatgcacgactgctcggcgtgtacgagcatttctacgatgacagcgtgttcgccaacgccggcagcgggccggacacccactatgtggtgctcggctattgcctggacctggacgatgggcagactcttttgctgcccaccgagcagcatcagcagtaccgttggtggccacaggatgaactgcgcttcagcccgcgcgtgcatgaaaacagccgcgcctatttctgacgctctgcctcgaggatgcatttatgttgttacccgtgatcatggcaggcggttcggggtcgcgcctgtggccgctgtcgcggcaacagaaccccaagcagttcctgcgcctgaccgatgcgcacctgtcgatgctgcagcagaccatccagcgcctggagggcgccaacgtcgccttgccgcagttgatctgtaacgagcagcatcgtttcctggtggccgagcagttgcgccagctcggcatggagcaggcgagcatcctgctggagccggtggggcgcaacaccgcgccggccatcgcgctggcggcgtgcaaggcggttgccgagggcctggacccgatcctgctggtgctggccgccgaccatttgatcgaagatgtgcccgcgttccatgccagcctcgaagtggcgttgcccctggccagggctggcaagctggtgaccttcggcatcaccccgacctgcgcgcataccggctacggctacatcgagcagggtgcggcggtgggcgagggcgggtaccgggtaaggcgctttgtcgagaagccggacgctgccacggccgcgcagtatgtggcgagcggtgattacgcctggaacagcggtatgttcatgttccgcgccagccgctacctggcagaactcgaacgcttccagccggccatgctcgaagcctgccgcgtggcgctggagggcggtagccaggacctgccgttcacccgcgtgcatgcggcaaccttcgccacatgtccggacgactccatcgactacgccgtgatggaaaaaaccgatgacgcggtgatggtgccgttgcacgccggctggagcgacatcggctcgtggtcggccctgtgggaggccagtgcaaaagacgccggcggcaatgtgctgcgcggtgatgggttgctgctcgatacccgcgatagctatgtgcacgccgacagccgcctggtcgccaccgtcggggtgcacgacttgatcatcgtcgagaccaaggacgccgtgctggtggcccacaaggaccaggtgcagcaggtcaaagggatcgttgatcagctcaagcaagccgggcggcatgagcacctcaaccaccgcgaggtgtatcggccgtggggcatgtatgactcggtggacagtggcgcgcggtatcaggtcaagcgcatcaccgtgaagccgggagccaaattgtcggtgcagatgcatcaccaccgcgccgaacactggatcgtggtcagcggcacggcccgggtcaccaatggcgagcagacctacctggtcgcggaaaaccagtcgacctatatccccattggccaggtgcatgcgctggagaatccgggggtgattcctctggaattgatcgaagtgcagtcggggtcttatctgggcgaagacgacattgttcggtttgaagacaagtacggcagggcctgaagtttccgacaattaataacgttccggataacttcaaccatcggcaatgcagtgagggccgggcactttgccggtaaaacgttattttcaactaatgctcctggaagttacccgtctggtgtgctgtttagttggatggcactatcggcccggctactcactgacgataaggagtctgttatgagaaaagcactggcggttattgtgctcagtgtcatgagtaccacggtgttggccgacgagttgccgttggggctcagtacaccgctggcgggttcggtgacagtcggggaaaccctgctggtcgccagcgccattgttgccggcgtggcggctgcgtccaacagcggcggcagttccaacggcggcaccaccaccgggaccaccggtacgaccggaaccaccggcaccggcaactgatccaccacttcccgcttttcagactgcttggactccccacccaagtagtctttttttcttgtcgtttatcgcgagtgtccgagcactatgatgcgtattttttctgtggcggccgtggccgctgcattgttacagggctgcatgttcgcacccggccaatacatggacacggcggcgttgactgaaagtggcggcgcgcaaaacagtcgggtggatttgattccgatcacgccaaagttacttgccatggacgcggccagccaagtaccttattccattcccgcggaactattgagttataagccgggcccgtatttgatcggcgccaatgacgcgttgtatatcaccgtgtgggatcaccctgaactcacggcaccgtccggcccgcaacaacagatcgatgccaacggccgcttggtcagccccgagggcaacctgttctacccctacgtgggtgagttggttgccaagggccgatccattgaagcgctgcgcagtgagatcaccgacaagctgcgccaatacatcgatagcccccaggtggacgtcagcgtactgcgcttcgccagccagcgcgtggtgatcaccggcgcggtagccaaggccgggccggtgccgatcaccaccatcccgctgaacgtgatggaagccatgggcgccgccgggatcgacccgctcaatgccgacctgtccaacctcacgctcagccggggcggcaagcgctacaccctggacctggacacgctcaacttggcgcagtcgcgcttgaacgacatctacctcaaggacggcgaccagctgtacctggcctacaacgaccgcaagcgcatctatgtgatgggcgaagtcatgcagccccgcgccctgaccttcaagacccgcagcatgaacctctccgacgtgctcggctcggtgggtggggtcaatcagaacacctccaacgcggacgcgatctatgtgattcgcggcgcgcagaacatcgccaacgagccggccaaagtgttccagctggaagctgcgtccccttcggccatggccctggccacgcgctttgatgtgcagccccaggatgtggtgtttgtcggcccggcgaatatcacgcgctggaaccgcttcatcagccagttgatcccttccgccacgatcgtcggcatcggagcgtccactcagaacaacctgagcgaagccagcagccgatagggtggaacctgcgtgaacactcataaattcgctgcttacaccggcttggcgtggctgttggctggctgcaatccgctgatgaccgcctccctcgataccttcaaggcggccgtggctgggccggcgccgctggagctgacccaggcccaggtggacgcagtgccgtttgcccagatcaaagtcaccacggtgtccagcgaaggggtgatggcgctgattcgccagcgtggcgacctgcagttctgggtggcttccggcaagcaggtgctgttggtgcgtaacggcttggtggtgcgtacggtcggcctgggcgtggacctcaatggcacgcactggcaggaccagtcgccgttccagcaaggcttgcaccgtgtgccggatggctaccaaagcacgcggcagatcgatggggtggacggctatcgcatgggcatcacgctcaccagccgtatgacccgcaagggcatcgaaacggtcgagatcctcggcacgccctacgctttgttgcgggtggacgaagacgtcgaggccagcggttttcaggcgcgcaaccgttactgggtcgaccccgtcgacggctttatcgtgcagagcgaacagcacctcacgcccgacctgaccctgaccatcacccagctgcaacccactcgcaaggacgcccgatgatctgtcgaatactcacggcgctgctgctgtcctggagttgcgtcagtacgagccacgccgccgtgaccgtcagcggccaggtgcgcaccccagggcctattgcgctgccacccgatccacgtttgctggacgcgatcattccgtcgcaaccggatgcccagggttattggctgggagcggcctggttgcatcaacccttgctggaacgccaggcgcggctcaaggccggtgtgctgtttgatttgcaaaccctgcaccaggccgcgcgggctgacgcacgcgaaggccgggcccgtgttgccgaacgcttgtatcagcaggtgcaggccttgccggtcactggccgccaggtggcggtgctggacccggtggcggtggaagtcggctttgcgccgaacctgccgctcagcgatggcgaccgcctggtgtacccgccacggcccacgcaggtgcgcgtggtgggggctgtcgctgcggcgtgcagcctggcgttcgagccgctgcgggcagcccgcgattacctcaccgcgtgcccgccactggtggaggcggatgctgattatttgtgggtgatccagcctgacgggaaggtctcgcgcctgggcattgcgccctggaaccgcgaagagggcgcccccccagcgcccggcgctacgctgctggtgccgatccgcagtgacgacctgagcgcgtccacccctgacctgaatcagcaactggccgagtttctcgccacccaacccctggccgaggttacgccttgaaattatgtattgcggccgtgctgctggtgccgtgtggcgtcgcgcatggtgatccccgttacacccaaagcgatttcggcggcgtggggctgctgcagacgcctaccgcccgcatggcgcccgccggcgaactcagcgtgaacgccaaccgcaccgagccctacagccgctatagtttttctgcgcaaccactggactggctggaaggcactttccgctacaccgcgatcaccaaccgtccttatggcgccgagtcgttcagcggcggccagagttacaaggacaaggccgtcgacgccaaggtgcgcttgaaccaggaaacccactggctgccggaagtggcgctggggttcatggacctgggcggcaccgggctgttttccagtgaatacctggtggccaacaagcggtatggcgacgtggatttcagtgctggtatcgcctggggttacctgggcagccgtggtgattttggcaacccgctgggcgcgctggatgatcgattcaacgagcgtcccagcgctgaaggatccggcagtttttccaacggctatttccgtggccggcccgcgctgtttggcggtgttgcctaccagacgccctgggcgccgttgagcctcaagcttgaagtggaaggcaacgactacaaaaatgaaccacgcagcaacagctttcgccaggcttcaccggtcaacctgggcctggtctacaagctcgccgatgcggtcgacgtgagcgccgcatgggagcgaggcaataccgcgatgttcggcattaccctgcacaccaattttgtcagccgcaaggcacccgccaagacctatgacccaccggctcctccgttgccggcgaagccaccgaccacaccgccggaccaggtggattgggccgccgtgtccctgcgcctgcacgataacgccggctacaatgtgcaacgcattacccagcgtggtccggagttgctggtgtatggcgaacagcagcgctatttctacagcgccaaggcggtggggcgcgccagtcgtatcctggacaacagcgtgaatgaccagatcgactggttcaccctggtcagcgaacgctatgccatgccgatcgaggaaaccagcgtgccgcgccagacctttcgcgaggtggtcaaccagcgcgaagccttgcaggacctgcaccgccaggtcgaggtcaatcgtgccagcgagcgtacgcagaccgtgctctacacccaaacgccgaagcccctcagctatgggctgggcctgggctacaagcagaacgtcggtgggccggatggtttgctctaccagatttccgccgacctcgatgccgagtaccgcttcacccgcaacacctggtggagtggtttgctcagcgtcaatctgctgaacaactacgatgggttcacctacgacgcgcccacgggcttgccgcgggtacgcaccgacctgcgcaagtacatgaccagtgccgacgtgaccttgccgacctttcagctcaaccatgcgcagcgcctggaccaggacctgtacggcatggtctacggtggtttgctggaatcgatgtatgccggtgtgggcagtgaagtgctgtaccggccgatgggtcagggctgggcggtgggtgccgatgtgaactatgtgcgtcagcgcggtttcgagcaggatttcagcctgcgcgactatcgcacggtgaccgggcatatcaccgggtataccgacctgccattcaacctgcagggggccttgagtgtcggtcgctacctggctcgggactggggtgcaacgctggatctttcgcgggagttcaacaatggcgtgcggattggtgcgtggatcactcgcaccaacgtgtccaagcaagagtttggcgaaggcagcttcgacaagggcctctacctgtccattccgtttgatgagttgatgagcctgtcgacgatgcgccgcgccaacctggtgtgggcaccgctgacccgcgatggcggcgcgcgcctgaatcgcgcgtattcgctgcattcgatgaccgatgggcgcgacagtgcattgttctacaagaatatcgacaagatcactgagtaaggccagtaggatcgggggttagtagatgtccttggacagcagcgtaaacggtgtcttcagcaggatcttgatatccagccacaacgaccaggtgttgatgtagcgcaggtcgatgtcgacgcgtttttgcatcttctccagagtctcggtctcaccccggcatccattgatctgcgccagcccggtgatgccgggcttgatgcgatggcgcgccatgtacgcgtgaatcttgcccgagtaatagtcgttgtgtgcgatggcgtgggggcgtggaccgaccagggccatatggccttgcagcacgttgaacaattgcggcaattcatcgatagaggtgcggcggataaaccggccgaccggcgtgatgcgcgaatcattgcggctggcctggcgtacctcgtggtcgtcatgcacgcgcatcgagcggaacttccacaccttgatcacctggccattccagccatgacggtcctgcttgaaaatcaccgggccgggggaggtgagcttgatcagcagggcaaacaccaggagcaccgggctcagcaccaggatggccaacagcgcgatgctcttgtccagcaacgctttgctcagggcggcggtggggcggctggtcagcgggctttcattgaggaagatcgctggcagcccatccacttcggcgacgcaatggttgagcagcagcatgttgttgaggtcgggcacccagatcacatccacgctgatctccagcaggttgaggtacaacgcctcgatgtgggtggcgtcctgcaacgagtgggtgatgtacaggcggcgaatgccatgctggcggatcagttgcggcaattgcggcagctcgccaaggatctgcgcctgtgcatccggagcggcctcggcatggctgccgacgagccccaccaacggcgagcgcttttggcgagacagagtgttcgccaggtcaacggcaagtttgccggtgcccactatcagtgacttatgccgttggtgaagttggcgatggtaataccgggacaggctgtgcagcgggatataacacagggccagcagagggtaactaaccgccgcccagagcaacaagatgtccaatggaaacaatgcggtggcattgcaggcgatacccaccgcgaacacgattaaagcggtgagtaaccagcccatgaacagtcgtcccaagcccacgccatagtcatctttcttgctgtagacatcacacagactgtacgccggtaatgaagccagtatggtaaacgccgcgagcacacggtagttgtactcaagttggccggtcttgaacacgaccaacataaataacagtgcaacgaccaaacccgaggcaagcatccactgaccccagaacgtcaaccccttgggggtcaggttgcgatgcattctagtgttattcagcatagttctgctcccggtggtgaccacgcaggtggtggcagggtctaatcacgcggtggaatacccgcactaaaagataggcacgcgcagtcgcgtacccacggatagtaatgaacggcaggaggcattggctgacgacttataacaaggtcagcggcgtcttagtgtgagagtgttataaatgggcaggtaaaagtgtgtattaataggcagggtgggtatcaaagtatccgttcttgttttttttgttttagcggcgtgacggggtgagttccagtggtttcttgattttttgtgtaaggcaataaccacggtttctgaccgcacgaaacaaacgttcgccgtcgttggcacgcttgaacttttcctgcagccggctcaggcacatttccaacccgcgatatagatcaggttcgcgtccgatattacggatcagttcctctttgctgacaacacgctcttcatggtgcagcatctttttaatcaacgccgattcaatggttgtcagtgaaatacgtaagccgcctttgaccagggtgcggtcatgctgtgtcagtagccagaaatcctgaggataaagttgagttcgctcagggtttatctccgtaggccgagtggggttattgggcgtgctgtcgtgatccgttggcatggggagtctggattcttgtcgcacagagttaaaagagtgtgagggtaagccaagtgtgtgggtaatgacataggttgtcaggcgtcggttgtcgtcggagttggagtgtagagggttgtttgcacggattttagggtctgtttctgttggcgcgaatgtattcaagtcgtaatgaaacaattcggcattgggcgtaaagtctcgcagtgcgatggccgcaagtgtgggggtgaaggcgtgtttcttgagggagctcatagtgtccaccgttagtatgaaagtgcggtttttataagcaatcggcaggggagtagtaaccgccctgaaagtattcgaacggcaggtttttagccagcatggcactgtcggcaaattccacggtgtcggcgatgaagcgcacccgggttgcactgatcagctcaagcatgcggtcgtaaagccgatcgaacagaccggaacgcgtattcaggctcagccgcagggcggagtccgggaaaggcattttcacgtagtcgtaaagcttgaggtcgatcagcaggtctgccggttttgtatcgagtctgtaattgttgtaggccagggtgacagcgcactggtcttttaacttatataactgacgcaccatcgctcggcgctcgacagggccgggcagggcatccagaggattggtaatactgagcgtaaagggctgtctgcgtttttccagtgactgggcggtctgaacaatgctcttgtggagatcttcgttcatcaaggcggcttgatcgatccgcaggaacttgcggctgacaacggaattgcaggctttatgtggtgcgctgatacgttgcagcgccttgtggtaggcactgtcgggtagttcgtgagcctgcagtgagccaacgctgacttcgttgccccaaagtgcatggctgcgatcaacgatggcttgcctggcaagcctgaagtccacagcatcggcaggggctaccttttcgctattcacggtgggatcgttccttggcggtttgaaaatggctggcacatataactccccggcttagtttgtaaccataaccacggatattctgaataatgttgtcaccgtagtgcgccttgattttactgcgcagtcggctgatggacttttccagggcgcgggagtcgtagtacttggtattaaggcccatgacttcggcgatttcattgtgactgagcagtcggcgctgtataagcgcgtccagaactttcatttcgacgaaggatatttcaagtttcttgccattaccataaaggcacatgcgatcctgatcgagcaccaggccacaacgattcagtcgttcaccttcactgagaaaagcatcaaacaggcttaactttttttcaggggacgcctctgccactttgatgcagtaatccgcgccggccagatagtatttggtcttgctcaaactggaggcgaatgtgacgacgacaaatatggtgcagttgggatggctgtttcgggtttttcttattatatccagggtttgattgcttgccgcgggggtgtcgatttctatgatgatagcgcggtagcttgcatggctttcctgggtgtcaacaagttgttcgtagtaacgtgtatcgactttcaaatcatccgctacagtgcgaactataagctcccgaaaatcctccgatttagattgagtccgtgcaatagcgaggacgttggaaaaatgcatcacctactcccttttccggcatgcaaggccgtcagttcaatcgctgctagcgtttagatactaatcgaattgaatacggtaaaacgtgacaaattttaacattcgccactttgtttttcagaaaggaatggggtagtgcgcggttattgcgagggtttttgcacgggcgtacacatatgctagtgcaaactcttaatgtgcgataagtattttagcccaaacggtttttttgctgaatcggggaaacccttgcatcgctaaggagggaaggcagaggtgcgcgccacgcgcctgcattcaaatctgctcctccccccgcaattgcacactcatgtcatcgcagtttttcgcccagtcgctgagccattgcggcatcggtggcgaggtctcatccaggcccagttccttcacaaagtcgcccgggggcagggtgcccttggctgaacggaacagcccgcgcatcaccaccacgccgaccacccggccgttgctcacgaagcggtgctccatcaggctccacttgtggtcccagccgagcatgcgtgtgtgtacctcaaacacttcgaacagcttcagctcgcgacggaatttgccccaggtatcgccgacgatcggcagcgccttgttgcgcaatgccacgcgaaaggccccggtgcgcaatacgaaatccatccgggcaacgtccgccagggaaaagtaccggccattggtgacgtgtcggttgatgtccaggtccagcggccacacgcgcatgcgcaccaccgtggtgtccaggccatgcacaggtttgcgccaggggcgccgggacagcatgaagagcaagcgaaaccacagattcatccaaagcacctgacagttgttcaaaggcagcactgtaggggcgtggaatccgctaaggtagatgcacaaatgacttattacatgcgaaaaacgcaatcgggcttttatcatgcatatcaccttgcttctggctgatcgctgctccgccgccagcgccaccacggccctggagatgctcagcgccgccaacctgtttgccgactcaccgcctttcgaagtcgcagtggcttccctggacggtcacgccgtggtggcctggggtggtcaacgcctgcaggttgatcacgcgctggcgcagatcgtgcggactgacctggtgttgatcccgggctttctgttcacgctgaaggaggccctaccgacctttcctgcgtacgcgccctggctgcgcaaacagcacgcacgtggtgcggtactggcttcgatgtgcaccgcagcttttctattggctgaatccggcgtactccagggcctgcgcgccacgacccactgggcgtttgccgagttgttccggcgccgctacaccgacgtgagcctggaggacgcgcagctcctctgcgaagagaaccgtgtgatcaccagcggcggggcgactgcagcgatggacttgatgctgcacctgatccgccggttcggctcgccggaactggcccatacctgtggccgatacctgctgatcgataacgtgcgcagcgaacaatcggtgtatgccatgtggtcactgcccaaaagccatggcgacggtgaggtcctgcgggtacagcactggctggaacaacactttgccgaacccttggtgattgacgaggtggcccggcaattcggttttggcgtgcgcaatttcaagcggcgcttcaaggaggctaccggcttcacgcccattgcctacctgcagaccctgcgtctggaacgggccaagcaaatgctggagtcgacccgcatgaccctggaaagcatcacctacgcggtgggctacgaagacagcaattcattccgtcgcctgttccagcaacgggtaggtgtgttgccggcggcgtatcgcaagaagttcctggtccggccggcttgactcaggggcgcggcaacagatcggcaaggcgttgctgtagatcgaccgtgacctgcatgaattacaggcgaaaaaaaaccggctgatcaggccggtttggggttcccgcaaacagcgcgggattatgcgttgttgccttgcaggcgatcagcaccgccttcggccaggccacgttcctgcaagcggtcagcaccgccttcggccaggccacgttcctgcaagcggtcagcaccgccttcggccaggccacgttcctgcaaacggtcggcgccaccttcggctacgcggttaccttgcagacggtcagcaccaccttcagcgacacggcgttccagcaggcggtccgaaccaccttcggcaacacggttgtcttgcaggcggtctgcaccaccctcggcgacgcggctttcgatcaggcgatccgaaccgccttcagccacaaccgggtgggcaaaagcattggcagcgagtaccgagaaagcgaggctaagcaagatttggcgtttcatgattgtgtgctccgagtgttttgatttaagtgttgccgggtatgggtttgatgttacgcgttgcattttttaagagaacttcattgggctgatggtgactatcgacgccagcgatggctcgtgtgggcgagccatcgcagggccggtcatggcatctgcggcagttcctgggggcgcaggtcgaacaccagcacctcggcgtcctcgccctggctcaggcggatctgccgctcatcccgcacccgggcgccgtcgccttcctgcaagcgctggccgttgatttcaacactgccccgggccacatggaggtacacatggcgatcgggcggcaggtccagggtcgcggtttcatcgccgttgaacagcccggcatacacccgtgcgtcctggcgcacgctgagggagccatcggcaccgtccggcgagatgatcaactgcaggcgcccacgtttctgggcctcgctgaagtgttcctgctggtagcgcggttcggcaccggccacggcaggcacgatccagatttgcaggaagtgcacgccacgggtctggctgtggttgaactcgctgtgggccacgccgctgccggcgctcatcagttgcacatcgccggggcggatcaccgagccggtgcccagggtgtccttgtgttccagggcgccttcgagcacataagagaagatctccatgtcgcggtgcgggtgctggccgaagcctttgccggcggcgacacggtcatcgttgatcaccaacaggtcggaaaaccctgttcttgcgggttccagtagttggcgaacgagaaggtgtggaacgacttcaaccaaccgtgattggcggcgccgcgttcggaagctttgcgaagggtcagcatggtcttgtcctcaagtgggagcgggctgcggtatgcagggctccggcgttgagaagaaggttaatggttactgggttattcattaagaagatgaaaactgaataactgtctcgttcaggttgacagtttcgagcgtgtcataatgcccgccgtattccttcccgatggaccttacctgctatgaaaaccgtggccatggcgctgtttccggacttcctgctgctcgatatggccgggccgctcgaggtgttttccattgccaaccgctacctgccggcggcggcgcattaccagatcctcacccttggcaccgagcccggtccgttgcgcgcctccaatggggtagcggtgcagacggacctgctgctggaccaggcccaggacgcctacgatctgctgctggtgcccggtggccccggtgcctataacgaatgtcacccggcactgctgccgtggctgagggccgcggccccacgggcgcggcgcttcggttcgatctgcaccggggcctttgtgctggggcatgccgggctgctggacggtcaccgcgtgaccacgcactggcactacaccgagcgactgatcaaggcgttccccaaggcgagggtcgaaacggatcgcatctacctgcaggacggacgcttgatcacctcgggcggcgtcaccgccggcatcgacctggcgctgtcggtggtggcccaggaccatggcaagcaagtcgccgtggacgtggccaaggtgttgctggtggtgatgaaacgccagggcggccaggcccagttcagcccgatgacggcggcggtggcaccgcaggaaaccacgattacccgggtgcagaaccatgtgctggcgcatctggaccaaccgttcaccatcgagtccatggctgagttggccggcatgagcgcccgccattttgcgcggctgttcgccaaggaagtgcagatgacgcccatggtcttcctgcaaggcgcgcgcatcgaccgcgcccggcagttgctggagaccaccgacctgccgctcaagaccgtggcttttcacgcaggcttcggcagcgtgcggcacatgcgctttctgttcagtgaaaaactgggcctcaacccgacccaataccgacagcagttcagttaacgacagaatgtccgtctcgcgcacccgaatgtccgtgtcgctccctgtgccagcattgtcctgtcacgggtagctggcaagatagcgtcaagcccacggaaaaggatgcgcaaacgcccaaggccgggtgtttcagcgctattgcacatatgaacaatcctcaggcgattgacgctgatggcacggttcgcttcggcgcctatgtgtttcaccggcagcagcggctggtcagcaagtcgggttggccggtgcctgtgggcgggcgtgcactggatatcctcacggtgctgctcgaagcgcccgggcagttcatcagcaaagccaccctgatcgagcgagtctggccgaacagcgtagtggaagaaaacaacctgagggtgcatatcgctgcactgcgccgtgtgctcgatgggcaacagttcattctgaatgaccctctgcgtggttactgtttcgcggcccgcgtacacggtgcgatgccggccgcgctgccacggcacaacctggcgatgcggctcagtgcagtgatcggccgtgacgaggtgttgggcgtgctggttcggcgtctgtccgggcaacacctgatgacgcttaccggatgcgccggtgtcggcaagagcaccctggccctggcattggccgagcgcgtgttgccgcgctaccgggacggcgtgtggtgggttgacctggctaccgtcgaggcgccgctgaccatgttgcgccacttggctgcggcgctgcacctggagccctgcagccacgccagcgaactgtgccgtcaattggtctcgcgccagctgttgctggtgctcgacggtgctgacctgctgctcggcgcctgccggcatctggtgcgtgtgctgcacgacaccgcgcctcaggtcagtgtgctggtgaccagccgcgaaagcctgcaagtccccggtgaatgggtgcaacgcgtgcccaggctggcgatcccagggccgactgcccagggcagtgtcgaacaggcgatggcttacccggcggtgcagttatttgttgcgcgggtgcgtgccagccagcaagggttcgcgctgcgcctgcatgacctggcgccgctgcgggacatctgtcggcgtctggacggtatcccgctggcattggaattggccgccgcccaagtcgatgccctgggcgtgcgcggtttgcagcagcagttgcgcgcaggcttgcaggtgctgacccgaggccggcgcaccgcggtggaacgccaccaatccctgacggcggccctggactggacctaccagcgcctgagcctgccggagcgctggctattcctgcaattggggttgttcaaaatggccgtgaccttgcccacgttgagtgaactggtcgccggtaccgagttggaacacgccgacctgtgctacctgctggggcgcctggttggcacgtcgctgctgactgttgaccccggccctggagacccgcgttaccgcctgctcaattgcgtgcgcagctacgccctggcgcaactgcgcgacccgttgcaggtggcgcgtttgcagcagggctatgggcattacctggggccgttttcaggccggccgtttgtcctgcaactcgtcgagcaggctgcgtacgcggactaggtcctgggtggcaaagccttcggtgaagcgggcgtagatcgaactcagcaagtcgcgcgccgcctgtatgcggccttgcgtctgccacaggcttgccaacgaggttgcacagcgtaattcccaggccagcgcgccttgctggtgcgccaggcccagggcttccagcagcagggcttctgccgcacggctatcggccaggctttcggcgcgcactcgcaggatttccggggtgcaccagccggccgcgccactgctggcgcgctcgaaggccgcgtcactgacctcgattgcattgaaggtcaccaggatatcctcgaccaggcccaacccctgcacatccgcgatgggcagcgtgccctcataacaacgcgcccaggtgtgaaacaactgcaccgagtgcttttgcgcctgttgcagcagctggtcctgatgttcgtgggccatgccgctgtcgccgttatagcgagcgatgaccaccccggccagggccagggtgtagcagatcgacgtgccatggttgatctgcaaggccagcgccagtgcctggcttgcggtacgccatgcgcgctccggataaccgcgcagccacaagatgcgcgcaaggatggtcagggaggcgacgctctggtcgtactgcacgccaaagccatgggtaaagcggttgagatggccgctctgggccatgcgctggatcacttgttcggcattgtgctgcgcgagggcctggtgaccggcgaagtgctgcgccaacacccgcaggcgctgggcactgagggccagcaacggctcggcctgcgggccgagctggtcgaagtgcaggctctgcgccaaggcctcacggtagttgccgcagcacaggttcaccgccatatgccccgacaccgcacgcagctggccggccaggtccttgccggcttccgccaggcgccgcgcgcaactgaacgcttcaatggtctgcggcgtgccgccctgggtgtgataggagaaactgcccagggccagttgcaaggccatgttcaagcgctggctcggcgcattcgattgcccgagtcgtgccagggccttgcccacgtacaagccgtgttcgcgcagcagcgacagctcctgccacaacggcatcgcactcaccgtcaggcgaatgcccagcaggtgcgcaccctggtcgcccaggccccagtcgagggcggcgcggatgtcttcgcgcagcggcgcatagcggtcgatccaggtctgggtcgcgatcagttcccaatcgtcctgcgcctggttcatcagcgccaggcagcgctcggcgtggtgctggcgggtggcgtcgagttcctgggcgacgctgagtttttccagggcataggtgcgggtgatgtccagcaggcggtagaccatctcgtcatcgccggcttccacattgagcaaggacttggcgaccagctgagtgatcgaattcagcacctcgtgcggtgcaatctgctccccggcaatcaccgccgccgcgctggccaggctgaacccgccgcgaaataccgccaggcgacgcaggcagatctgttcgcaggcggtcagcagcgcaaagctccagtccagggtcgcgcgcagggtctgatggcggggcagggcgcttcgccggcctcgggttagcaggcggaagttgtcttccatctgcaccagcagtccgggcaggccgaagcgttcgatctgcgccgccacgagttcgatggccaggggaataccgtccaggcgctggcagatatcaatcgccagcggcagctcggcctcgctcagttcaaagctgtcctgatgggacatggcccgctcgatcaacaattgcagggccgggtagcccagcgcctgggcacggttgccggtggcgggtgggcaggccaggggctccaggcgctgcacgtattcgccctcggcgcgcaaggcctcgcggctggtggccaggatgtgcaagcggggcgcgtggcgcagcagggtttcgctgatcagggcgatgtcgtcgagcacgtgctcgcaattgtcgatcaccagcagcaactggtgctcctgcaagcgccgcgcaaacgtgggcagggcttcgtgctcggcgtgggtgaggtcgagcagggcggcgaggttgggcaggatcatcgacggcgcgctcagtggcgccaggtccagcaagcggatgccgtcgcggtagtgcccgatcagcaattccgcgacccgcagggccaccgtggtcttgccgatgccgccggcgccggtcagggtgataaagcgttgctcgggcagttgctgtaccaggctgtcgatcagggcctggcggccgagcatgcgggtacggcgcagcggcagattgtggcacgggcgttgggcagcaccttcggttggcagggtcatcggctcgatgctcagtggcgcaacaaaactgtagccacgctgggccacggtcacgatatagcgctgcccggcctggccatcgcccaatgccttgcgcaacgccgccatatgcacccgcaggttgccgtcttccaccacgctcctgggccagacgcgggcgatcagctcctgcttgctcaccacattgccggcctgctccagcaggatcagcaggatatccaccgcacgccgccccaggcgcaatgggcgacccgcctccagcaccaggcgctggcgcgggtggatgcggtaggggccgaagtgcacggcctggtcgctgaggtcgttcatgggtggccatgctcggaacggggtgagcggccagcataggccaggcaggccaggaccactaggccgcgatcacttgcggtttagagcgagagtggtgatttcgccaggtcatcgggttgacgccttcgctgcgggtgaacatatgacagaagtgcgcctggtcgcagaagccgcattccaggctgatttgcgtcaggctcaaggatgactgggcgatcagctccttggcccgctggatgcgctgttggcggatccattcctgcggcgacagcccggtggtgcacttgaacgcacgggaaaaatggctgcgcgacagcgcgcaggcctgggcgaggtcggcaatggccaggctttcgccgaggttggccaggatcagctgtttggcgatgcgctcgcgccgtgggcacaggccaccggtggcggacacgcgaggggcgtattgatcgagtcgggccatgacaaatatccgcagtcgatgggagcgttcccggtggatggatgcagtgtagacgtggccaatcttgttgccggaccgtccggctgacgagttaatcgttgttaatttcgccaggtgccgaccaggaaaagacagcacaggcgtgcaatgtggccggcgccttgcgtgtttatctgtgagcttgccaaccgtgtggatatcaccatgaatcgcaacgacctgcgccgcgtcgacatgaacctgctggtgattttcgaggcgttgatgttcgagaagaacctgacccgggtcgccgaaaaactcttcatgggccaaccggcggtgagtgcggcattgggacgtttgcgcgatctgttcgacgacccgttgctgctgcgcaacggccggggcatggagcccacgccacgcgccgtggcgatactcaaggagttgcaaccggccatggacaccatttccggcgcggtcagccgcgcgaaggatttcgacccttccagcagttgtgcggtgtttcgcattggcctttcagacgatgccgaattcggtctgtttccgccgttgctcagtcaactgcgcgaagaggcgccgggcattgtcgtggtggtgcgtcgggccaactatctgttgatgtcgtcattgctggccagcggcgagatttcggtgggggtgagctacaccacggaattgccggcgaatgccaagcgcaagaagctgcgggatattccgtgcaaggtcttgcgtggggatggcggtgttgaaccgctgaccctcgacgactactgcgaacggccccatgcgatggtgtcgttttcgggggacttgagcggcaacatcgacctggacctggcacgcattggtcgtacgcgccgggtggtgttggcggtgccgcagttcagtgggttgcgggcgttgctcgccggtacgcagattattgcgacggtgccggattatgcggcgtgtgcgttgacggaggggacgtcgctacgggcgcaggacccgccgtttgcgattgatgcggcggagttgtcgatggtgtggagtggggtgcatgacaatgatccggcggagcggtggttgagggggaggattggggagcatatggctcgggtggtttgactgggtacatatccgttgcttcggtaacggctacttatggttccggtccgtacagaagagcgcaaaaagtaaccaaaaacgcttcgccccaacactcggcacctcgcctaggctcggtgtgccctcactccggccagcgtgtttgacggggcgccccagatcaaaagcaagagcgcggcggccttagagccgaccggattgaatggccggtactcggtcaaagtgtgggagggggcttgcccccgatggcagtgggtcagtcactgatgagttggctgacacaccgccatcgggggcaag

SEQ ID NO: 7 - DNA, 254513 bp, Pseudomonas nodulensis
ggggcttgcccccgatggcagtgggtcagtcactgatgagttggctgacacaccgccatcgggggcaagccccctcccacagtttgatcttcatgtatcagttgaagggtggtttgctctggctctggtttttgatcttaggcggccccccaaatcactgtcggattacgggcacaccgagcctaagcgaggtgccgagtgttggggcaagagcgctttggttactttcgcgcttttcgaaagtgacccgccgtaagggcggaaccataagccgccgttaccgaaataacggatatgtactcaaccccagcacccaaaaattggtcacccattcttacccaaaattggctattcctcccccaaggcccgatgactaacctagccatcaatccccaccgccctggagcatcaccatgcaaccccgtaccgatttctacaccgcctccccagacgccatgaaagccatgctcgccctggaagccgccgtcggcaaactgtccatcgaactaccgttgctggaactgatacgcctgcgcgtctcgcagatcaacggctgtgccttctgcctcgacatgcacaccgccgacgcccgcaaaggcggcgagaccgaacgccgcctgtacaccgtgtcggcctggcgtgaaacgccgttcttcaccccgcgtgaacgcgccgcgctggcctgggccgaaagcctgaccctgatcagccatacccacgcaccggatgaagacttcaacgcactggccgccgagttcagcccccaggaacaggtcgacctgagtgtggccatcgccaccatcaacagctggaaccgcctggccgtgggttttcgcaagatgcctaagtaagcctcagaagttgaccgaggcactcaggcgcgccgtcaatggcgcgccctggaacaggtagtcatcgcccatgtactcgcccgcgtcgcgccagtagcgcttgtcgaacaggttgtcgacgctcaggcggaacaccgtctcatagccgtccacttgggtggtatagcggctgcccacattcaccaccgcgtagtcccccacttccacattgccgctgcggttggcgtacttcttggcgctgtattgcactccgcccaataccgccaggccgttcacccacggcaacgcataatcggcatacacactggcgcgcaacttgggcacgttgatcgcctggtggccttcgtagtccggcgtgccgctgccggtcacccgtgcgcgaatcgccgccacgctggttgcgatctgcaggcgttcggtggcccagccgttggccgacaattccagcccggtgttcttttgctcgccctgttgcacgtagtcgaatttaccggtgccatccggcttggcgtactggtaggcctggcgggtctggaatacagcggcggcgaagctgatgcggcgccagtcgtatttcaccccagcttcgatttggcgtgaggtggtcggggcgagcgtttcgtcggtgttgttggcgaaccacggcgcggtgccgcccagggacaggcctttgctgtagctggtatagagcgagatgttctcgacaggtttgtagatcaacgaggcctggggcaggaacacgtactgctgggtatgacgggcctggttgccggtgacgctgtcgaaggccttttcatccaggcgcacttcacgaccgccgaggatggtttgccattgctcgttgaaacggatgcggtctgtaacgaacaggccgtactgacggctgtcgaggttgcggtggctgtcgttcaacggcttgtcagtcggggtaaacgtaggggcgtccacgtcgatgttggtggtgccgatgtattcattgacggatttgcgcttgtcgatcacccggcggaacgcactggtgccaaaggtcagttcatggcccaggccggcggtgtcgaacagcccggtcatggccgcctgcacttcgtcgtcacggcgggtgtcgtcagggctgcggtagtcgtagacgtcgtagttgccttcggggctgaagtagtttggcacgctcgaggtgcaactggtcgagccatagcagccccaggcaaacgagctgtaatcgtcgatcaccaccttgctgcgcgccgcactcacgctgcctttccactggtcgttgaaacggtattcaaacttgccgttgaggttcagcgaatcaatgcccacctgcctggacccactctgatgccccagcagtttcttcggcgaggcaccgtgtggcacctcggtgccgcccagcaactggtagcccggtaccgagcgttgctgcttgttctggtattcggcatccagttgcaacacggcgtcggggctgatgttccagtcgaaggccagggacataaaatcgcgctggccgttggcgtgttccacgtacgcgttgaggtcctcgtgggccacgttggcgcgcaggccgaattgttgctcgctgccgaaccagccgccgacgtcggtggcgatataaccgctgccacgatcgtcggtggagatggtcaccgagcgcacgtcttccgggcgcttggtcacgtagttgatcacgccgctcggctcggagatgccactttgcaggccggccaggcccttgagcacttcgacctgctgcttgttctccagcgcgacgttctgctcgccggtgatggtgcgcccgttgatcttgtagctgctcgccgcattcagcgaaaagccgcgcaccacgaagttctcgtagtagccgatgggcgcatagctgtcgcccaccgaggcgtcgttgcgcagcacttcactgagcaggcgcgcttgctggtccttgatcagtgcggcgttgatcaccgtgatcgaggccggggtgtcgagcagcggtgcctcatcgaagccgcccaccgaagcggtttcgctgcggtagccggattcatcctggccctggaccttcacttccggcagttcaaggtcagccgccaggctgtgaccgatgccgccgctgagcagcaaaccgagggcgaaacgtgaggtgacgacgggacgaaaacgcaaaaccatgggggcagggccttaaagcgcgggcggggggcgcataagctaggcataagtgcgcagttttacaagttcgcgagaatgattcgcggcttgagacatcccgtctcacaccacacgccaatccatccgcgtctcgacagcccgccgggcacctgcgatagacaaggcttccctcatcaattgcaggagaacgccatgagtattgctggaaaagtcgcgctggtgaccggcgccgggcagggcattggccgggccattgccctgcgcctggcacaggacggtgccgatatcgcgctggtggacatcaatggcgccaagcttgaagccgtggccgccgaagtcgtcgcgctgggccgcaaggcctcggtgttcgtcgctgacgtgtccaagcgcgaacaggtggcggcggcggtggagcatgcgcaccagaccctgggtagtttcgacatcatcgtcaacaacgccggggtggcgcagatcgattcgctgttggacgtcagcccggaacaggtcgagcgcaccctgggcatcaacgtgcagggcgtgttgtggggcatccaggccgccggcaagaaattcaaggcgctcaagcagaagggcaagatcatcaacgcctgctccatcgccggccatgaaggttttgcgcttctgggagtgtactcggccaccaagtttgccgtgcgtgccttgacgcaggcggcggccaaggaactggcgagcgccgggattaccgtcaatgcctactgtccgggtgtggtgggcaccgatatgtgggtcgagatcgacaagcgcatggccgagatcaccggtgccgaagtcggtgcgacctacaagaaatacgtggatggcatcgccttgggccgggcgcagacgccggaggatgtggcggggctggtcgcgtacctggccgggccggatgcggactacatgaccgggcaatcgccgctgatcgacgggggccttgtctaccgctgacatctcagatgtacccagtccaatgtgggagggggcttgcccccgatagcagtgtgtcagccactggaagtattagctggtccaccgccatcgggggcaagccccctcccacagtgttgaccccgttgtatcagcgggttttgttcggcatgtcgatgcccagttggttgacgcggcggtacagggtcgcccttgagatccccagcgcctgcgcggtcggtatcggcttccagcgatgccgaatcagcgcatccagcaccacctggcgctccgggctcgcacgatcttccgtcaatgcttcaacctgttccccacgcacctccaccggcaaatccgccacctgcaccgtaccgccctcacacaccgcacaggcatacgccagcacatgccgcagttgccgcacattgcccggccacgcgtaccccaacagcaactccagcgcagcctggccgattcccaccgtgatgccgttgttgcgcgcttcctgttccagcaagcggttgatcagcgccagtttgtcagtgcgttcgcgcaacggcggcaggcagaagcgcgcgcagccgaggcgaaagtacaggtcctcgcgaaagctgccctcactgaccaacaccgacaaatcgcggtggctggcgcagatcacctggatatcgacggtgcgggttttcgcggcgcccagcggcgccacttcaccttcggccatcacccgcagcaggcgcgtctgcaaggccaggggcatgtcgccgatttcatcgaggaacacggtgccgccatcggcctgcaccagcaaccccggcatgcctttgctggcggcgccggtgaaggcgccagccacatagccgaacagctcgctctcaatcaggttttccggaatcgccgcgcagttcaccgccacgaacggcccactgcgtcgggcgctgcgttcgtgcaactggcgggcgaagacttccttgccggcgccggtttcgccttgcaccagtaccggcaggttgcggtccttgacccgcacggccaggcgcaggtgttcctccacacgggcatccaccaagggcaccatgggcgcccgcgccggtttgcgtcgcggcgcgttgacccgcacgtgcagcgcacccggttctcccagccactgcagttgctgggtggactggtcggtgacggcgcgcaaggcgttcaggtcgaacacctcaccgatatgtgccggcacctggccaaagcgccggcgcaaggcctggcgcgccttgctgttcaaggcccgcagacggccgtcctggtcccaggccagcagcaggtcgggctggctgtccacataacccggcgtgctgtgcgcttgcaacacccagtgctggcgggcgctgtgcatgaagaaggcgttctcgatggcctcggcactttgcgccaccaactggcgtatcaggtgctggctgcggcggtcatctggcgatttgagcgccgaggcatccatcactcccagcaggttgccctgggggtcgaagatcggcgcggcggagcaggtcaggccgatgaaggctgcacgaaagtggtcgcgcttgtgcaccgtcaccgccgattgactggtgagcacggtggccacgccgcaagtgccttcttcggcttccgaccagcaggtgccgaggtacaggccggccttgcggcagtcgctgcggatcgaggtgtccacgcggtggtcgatggtctggccctgggcatcggtgagcatcacgcagtagtcggcctggcgcacacggtgatgcagttgcccgacggcttcgccggcaatgcgcatgaacagttcggcgcgttcgcggcattccttgagcaagggttcgctgaggatgcgtggcccctgcagggagccggggtccaggtggtgttgctccatggagcgccgccatgaatcgaagatcagcgacggcaccggcgcctggggcagacgatcagcattgcggaccacgcgactgacgcagtcgacgtgctccctggagttcgcggcgagcataaggcctccggttctcgatctttgttgttatacccgccattaagcgcgcatgcgtcgggtgggacaagcgcggcctgaccaactgcccggtatgagacgcagcgtctcaaaccggctgagacgccgccttcgagttgcaatgccgcgtctcattctgcgacgccggcctgcttgcgacaaccgctctggatcaaggttatgccaggttttttacggccttggcacaggctgtgctgaaggccttgtagctgaccacgatcagccttttgtgtgccgagacaacctggagaacaacaagatgtccactcacctgtccaccgatcaactgctgcatgcctataccgtgatgcgcaccatccgtgatttcgaagaacgcctgcacgtggaattcgccaccggcgagatccccggtttcgtgcacctctacgccggtcaggaagccagtgccgccggagtcatggcccacctcaacgatgaagactgcatcgcctccaaccaccgtggccacggccattgcatcgccaagggcgtggatgtgttcggcatgatggccgagatctacggcaagaaaaccggtgtgtgtggcggtaaaggcggctccatgcacatcgccgaccaggagaagggcatgctcggcgccaacggtattgtcggcgcgggtgcgccgttggccgccggtgcggcgctggcggccagactcaagggtagccagggcgtggccgtggcgttctttggcgatggcggctccaacgagggcgcggtgttcgaggcgatgaacctggcctcgatcatgaaactgccgtgcctgttcgtcgcggaaaacaacggctatgccgaggccaccgggtctggttggtcggtggcgtgcaaggacatcgccgagcgtgccgtggggtttggcatgccggggatgatcgtcgatggcaatgatttcttcgccgtgtacgcggcgcttggtgttgccgtggagcgtgcgcgcaagggcgacgggccaaccttggtcgaagtgaaattgagccgcttctacggccatttcgaaggcgatgcacaaacctatcgtggccccgatgaagtgaaaaacctgcgggaaaacgccgactgcctggcgctgttccgccagcgttgcagcgccgaaggctggctggacgcggcgcaattcgagcgcatcgatggcgaggtcgcacagcttattgacgacgccgtgcgccgcgccaagtccgaccccaagccccaggccgccgacctgctcagcgatgtctacgtcgcctaccactcataacaacaacattcgtggagagaactttatggctcgcaaaatcagctaccagcaggcaatcaacgaagccctggcccaggaaatgcgccgcgaccagagtgtgttcatcatcggccaggacgtgtccggcggcacgggttcccctggcgaacaggacgcctggggcggggtgctcggcgtgaccaagggcctgtatccggagtttcccgaccgcgtgctcgatgcgccgctgtccgaagtcggctacgtgggcatggccgtcggcgccgccacccgtggcatgcgcccggtgtgcgaattgatgttcgtcgacttcatcggctgctgcctcgaccagttgctcaaccaggccgccaagttccgctacatgttcggcggcaagaccaccacgccgctggtggtacgcgccatgtacggcgccgggctgcgggccgccgcccagcattcgcagatgctcacgtcgatgtggacccacatacccggcctcaaagtggtgtgcccggccacgccctatgacgccaagggcatgttgatccaggcgatccgcgacaacgacccggtgatcttcctcgaacacaagatgctctacagcctgcaaggcgaggtgcccgaagagctgtacaccgtgccctttggtgaagccaattttgtccgcgagggcaaggacgtgaccctggtgacgtacggacgcatgctgcacatcgccctggaagccgccaccagcctggcgcgccaaggcatcgattgcgaagtgctggatctgcgcaccaccagtccgttggacgtcgacagcatccttgaaagcgtggaaaagaccgggcgcctggtggtgatcgacgagtcaaacccacgctgctccattgccaccgatatcagtgcgctggtcgcccagcagggtttttctttcctgcgcgcgccaatcgaaatggtcaccgcgccgcacacgccggtgccgttctccgatgcgctggaagacctgtatatccccaacgccgcaaagatcgaagccgcggtgctgcgaatcgccaacaagaggagcgccgcatgatccataccttgaccatgcccaagtgggggctgtcgatgaccgaggggcgcatcgatatctggctcaagcaacccggcgaccgggtggagaagggcgaggaagtgctggacgtggagactgacaaactctccagcagtgtggaggcaccgttcagtggcgtgctgcgccgcgtgcttgcactgagtgacgagacccggccggtgggcgcgttgctgggaatcgtggtggaaggcgaggccagcgaagcagagatcgatgcggtgatcgaacgcttcaatgccggttttgtttccagcagtgccgaaaccgaagcgtcgggaccgagtgcgcagaaggtcgagatagacgggcgcctgttgcgctatctcgagctgggcgaggcggggacgccgttggtgctgattcacggattcggtggcgacctgaacaactggctgttcaaccaaccggcattggccgtcgagcgccgggtgatcgccctggacctgccggggcatggcgagtcgggcaagcaactgcgcagcggcgatgtcgaggaactgagccaggcggtgctggccttgcttgatcacctcaagttcgaccgcgtgcacctggccgggcattccatgggcggactggtcgcactgaccgtggctgaccaggcgcccgcgcgtgttgcctcattgaccctgatcgccagcgccggtctcggcccggatatcaacggtgattacttgcaggggtttaccgaagccaacaaccgcaatgcgctcaagccgcaattgacccaactgttcagcgacccggcgctggtgacgcggcagatgctggaggacatgctcaagttcaagcggttggaaggggtggcgcaggctttgaggcaactcaatgcccagttgttcgagggagggcgccaacgtctggatctgcgcaaggtggtggggcagcaaccgagtctggtgatctggggtagcgacgacgcaatcatccccgtcagtcatgccgaggggttggacgcccaagtgcagattctgccggggcaggggcatatggtgcagttggaggcggcggaacgggtcaaccaactgatggccgccttcctcaaatcccaaccttgaaatgcagcccaatgtgggagggggcaagccccctcccaccatttggattggatttcaaacggaacgcttcagggtctcgctcggcaactccttgaacaacgcccgatagctattggaaaaccgccccagatgccagaacgaccagttcatcgccacctcggccacggtggtcccggctgaactcagcagttcccgccgtgccccattcaatctgcgcaagcgcagccactgcgccgggctcatcccggtgtaggtcttgaacccttgctgcaactggcgcaatggcacgccggcaatctgcgccagttccagcaggttgacggtctcgtccggcgcgtccgccgcccattcgccgatgcgcgccatcagccggcgttcctcgctgcggcgctgcaaggaactgcggtccaggcacacgcaggcgttgtcgaggatgaacaggcaatcgtcgagcaattgctggataagcgcggcggggtcgctgatcgtggacaagcgtgtcagcgtgccactcagccaacgggcgaacaacgcgttctgctggccggtcagtggcgccatgaacaaaccttccagcttcgccacctccaacccatggcgctgcacgaactgcgggccgaacaccaccgccacttcacggtagttttccggggtgatccaggtgttacggctctcgccattgagcaggtacagcgcgttgtcgctgccgtcgaaacagaacgccagggagccggcaggcgcattgaagtgctgttcgacgcgggtgttcatgcactcttcgtacacctccacgccttgcaggtcgaggtagcggatgcgcccggcgaaatgccccggggacatctgctggtactgctgcacccagccgggtgtcgcactgcattgagcggccacatcaccggtggtgaaggcctgtacgcgcaaagcggttgcctgtgtcatggggagcctgggcgcactctattggtgcgttgtggtgcgtgcaaagtggatagatgccggcgggcggcggcctcaagatagacctcaatgcgccaggagtacaagccggcgcatgcacccaacccatgccgaggtccttatgaacgcccccttcgatcagctgtccgcctggctgaaagaacacaagattaccgaagtcgaatgcgtgatcagtgatttgactggcatcgcccgcggcaagattgcgcccaccaacaagttcttgcatgagcgaggcatgcgcctgccggaaagtgtgttgctgcaaacggtaaccggggactttgtcgacgacgagatctactacgacctgctcgacccggccgatatcgacatggtctgtcgcccggtgtcccacgccacttatgtggtgccgtgggccatcgagcccaccgcaatcgtgatccacgacaccttcgacaaacagggcaaccccatcgagctgtcaccgcgcaatgtgctgaaaaaagtcctgcagctctacaccgacaagggctggcagccgattgtcgcgccggaaatggagttctacctgacccagcgttgcgaagacccggacctgccgctgaaaaccccggtgggccgctccggccgcgccgagaccgggcggcagtcgttctccatcgacgccgccaacgagttcgacccgctgttcgaagacgtctacgactggtgcgaagcccagggcctggacctcgacacgctgatccacgaggacggcccggcgcagatggaaatcaacttccgccatggcgatgccctcgacctggccgaccagatcaccgtgttcaaacgcaccctgcgcgaggccgcgctcaagcacaacgtggccgcgaccttcatggccaagccggtggccgacgagccaggcagcgccatgcacctgcaccagagcgtggtggagatcgccaccggcaaaccggtgttcgtcgatgccgacggcaacaagagccagttgttcctgcaccatatcggcggcctgcagaagtacatccccaagctgctgccgatgttcgcgcccaatgtgaactcgttccgccgcttcctgccggacacctcagcgccggtcaacgtcgagtggggcgaagaaaaccgcaccgtcggcctgcgcgtgcccacctccagccccgacgccatgcgcgtggaaaaccgcctgcccggcgccgatgccaatccgtacctggcgattgcggctagtctgctgtgtggctacctgggcatggtcgagcagatcgaacccagcgcaccagtggaaggccgtgcctacgagcgtcgtaacctgcgcctgccgttcaccctcgaagatgcgctggcacgcatggaggactgcgacacggtcaagcagtacctgggcgacaagttcgtgcgcggctacgtcgcggtcaagcgcgccgagcacgagaatttcaagcgggtgatcagttcctgggagcgtgagttcctgctgttgagcgtctaaaaaaccaataaaggggtgtcgatatgcgtcttgtgaaacagcttttcccgctggccctggtggccgcgttcagcagcgccagccaagcggcgccgacagtcagtatctacaactggaccgactatatcggcgagaccaccctggccgacttccaggccaagactgggatcaagccgatctacgacgtgttcgactccaacgagaccctggaaggcaagttgctcgccggccgcaccggctatgacgtggtggtgccgtccaaccacttcctggcgcggcaagtgaaggccggtgcgttcctcaagctcgaccgcgcgcagttgcccaacttcaagaacctcgaccccaagctgctcgcgctgctggagaaaaacgacccgggtaacgcgcattcggtgccgtacctgtggggcaccaatggcatcggctacaacgtcgacaaggtcaagcaggtgctgggcatcgaccatatcgactcatgggcggtgctgttcgaaccggagaacatcaagaagctcaaccagtgcggcgtggccttcctcgattcggcggacgagctgttcccggcgatcctgaattacctgggcaaggatccgcgcagcgagaaccctgaagactacaagcaggccgaagccaagctgttgacgctgcggccgtacatcacctacttccattcctccaagtacatctcggacctggccaacggtgatatctgcgtggctttcgggtattccggcgacgtgttccaggccgccaaccgcgccaaggaagccaagaacggcgttcacatcgcctattcgattcccaaggaaggctccaacctgtggttcgacctgctggcgattcccgccgacgcgagcaacccgaaagaagcccacgccttcatcaactacctgctcgacccgcaagtgatcgccaaggtcagcgcctcggtgggttatgccaacgccaatccggcggccaaggcgttcatggaccctgagttggtgaacaaccccgaggtatacccgccgcaggcggtgctcgacaaactctatatttccaccacgccgaccccggcgaccatgcgcctgatgacccgcgcctggagcaaagtgaagaccaacaaatgatgcagtcgactgaccacgcccggtcctactaccgggccacggccaacgccctgacggagcgccccgcattgggcgccgacttgagcgccgatgtgtgcgtgatcggcggcgggttcactggcgtaaataccgccatcgaactggcccagcgcgggctctcggtgatcctgctggaagcccggcgcatcggctggggcgccagcgggcgcaacggcgggcagttgattcgcggtatcggccatgacgtgtcgggatttgccaaatacgtgggcgaggagggcgtgcgttacctggagcgcgccggtatcgagtcggtggccttggtgggcgagcgcattcgcgagcatgggattgactgcgacctgcgctggggcttttgtgaattggcgaacacgcccgcgcaattcgccgcgttcaagggcgagcaggcgcacctggcggagctggggtatgcccatgaaacccgcctggtcggcgtgcaagatatgcagcaagtggtcggatcgacggtgtatgccggcggcctggtggacatgggttccgggcaccttcacccgttgaatctggtgctgggtgaagcgcagttggctgagtctcttggagtgcggatcttcgagcacactgaggtgcttgaactgatccacggcgacacggtgcaagtgcgctgctcaggcggcacggtacgcgccgaccacctggtgctggcctgcaatgcccatctggaggaactggaaccgcgcctgagcggcaaggtgctcccggcgggcagctacatcatcgccaccgagccgttgtcggaagatgtggccaaccagttgatcccgcagaacctggcgctgtgcgaccagaaagtcggcctggattactaccgattgtccgctgaccgccgcctgttattcggcggcgcctgtcattactccggccgcgatccggtggacatcgccgcttatatgcagccgaaaatgctcaaggtgttcccgcaactggcccagaccaccattgagtttcagtggggcggcaagatcggtattaccgccaaccgctttccgcaggtggggcggttgaagcagtaccctaatgtgttttatgcccagggctattccgggcatgggttgaacgtgacgcactggtgtgcaaggttgttggccgaggggattcacgccggtcacagtgccggcctggatattttcagccaggtgccgcatatgaccttcccgggggggaaggcattgcggtcaccgctgttggcgttggggatgatgtggtttcggttgagggagatcgtgcagtgaagcgttgcaataaggactgaatagctacattcgaacgcgatttgttatgtccccgaaaggagggcgagtgtaggcaaacctcttattaaccacgcaggtcactatagatctttcgttggcgatgttctttgggttttcacatatccataggcttttgacgggcccctgcgtgttggcgagactcgtgagtggggttgcaagagctgttgtgaatatgggcaggcccaacacaatgctcaatataggtaaggtccaagtattgtgtttcattgaggtgtttcccgaaggcagtttcggagaatggtttcctttttcaaggcaacatagcccctaccgcatcgaagttaacggccgcatcggtcgaggatcccactgcgtacgcgcctgcgggtgaaatgctattcaggttgctgctcccccctggcgtaaggggcgatatggcgaccgtgcccgccgagggggtccaatagcacgccgtggataattggttggcgttaacacaattcaaggcaacggtatcgttgttggaaaaaccaactgcttggatcagattgttgccgggcagcggattgaccggttgcacggtgaaagagtttgcagggtcttgccagtaaaaaggtatatcaagtcccgtaggttctttgccgtacgccaatacatgcccaagatcattgatcgccacggcgtggttcagtgcattcagaggcaacgtcaggagcaaaggtgtttggtcataaaactcccagaaggcggtttgccgtgtgtcggcggccgacccgggaaacgtgcaggtgcctgcaatcctgccctgattgttcatgtctacggcaaagcagtaaatggctcccgtcggtagcttcgcgggttctaacgtatagccgctaccgttccacctggcgaccttgatgacgggagggccgtctggtccagggcaattcaacaggataagcgggcgcccgccgaacagggtttcggtcaagtcaacgccagtacagttgtcgccccagcccgacacccgctctggcgtggagttacccgcggtgtagatcaccaccgtcggaactccgcttgcgctcaggcttcgcgccacaaccaccccgttctgattttgtgcggttggcgtcgtttgtttgtcagccgggcgcaacagcgggaacagcaaggtgcctggcagcggattcataggtgttggtgtaacggctggggttgcggggttccaaaaaacgccgaacaggacgccaaggctgttggcgcagacccccactatcgaattattgctggtgttggcgatagccgatacttggcaaggctgacctgcggccagcggcgccagcttttgctgggggcctgccagtgttgccgagtaccatggaccgatgttggcactgggtgttgtcgaactgcagtcgcccactatttgcccgctgtcgttgcccccaatcgtctcgcattgcactccggcagcatggcccgaactgacgaatgtcgccgcactggcactcaatccatacccgcaaagcaacacacccacactcaacaccatcggtgcaatcagttgtctcaacaaacgttgcataatccgtccttccctggctgacagaatgacccactgggggtgaacccccacggtccctgaatgccagtaaacgccaggttcgatggacgcacaactgtcacttctgacaggtacaggaggagttgccttaagcctcggtcagcactttcctgaacgtttccaccaacggccgcaaattgacccgatgccacgccacccacagtggcgtggtgtacgtcagccacggtaattcgcgcaagatcacgccgggcggtgcattgcggctcaggcctttttgcaccatcgccacacccaaccctgaagccaccaaccccagcgcggtaaacggctcgctcgcttccatggggatctgcggggtgaagccggcgcggatgcaggcggcgacgaagtcatcggcggggttggcgccgggtttgcgctgcacgccgatccactcctggtcggccaggtgttcgggcaacatttcactcaggcgtgccaagggatggtgctcgggcaacgccagcagcatcggttcgtccagcacctgcaaggcggtcaggtccggatcatcggcggccggcggttcgccgaccagggcgatatccaggctgcgttggcgcaggccttcgagttgttcgagggacggcaggttatacagcttgatgtgcacgttcggccggtcgtcgcgcagtacccgcagcgcgttgggcagcacaccggcatgcatggcgttttcgatatagccgatgcacaggccaccttcttcaccgcggcccaggcgcttgcccagtgattccaggcggttggcgtgggtcagcagcgccttggtttctgccaggaacgtctggccgtcacgggtcaggcggatgcgttgctggctgcgttcgaacagggtcaggcccaggcgttcttcgagctgggcgatctgccggctcagcggcgactgggagatgtgcaggcgttcggcggcgcggccgacgtgttcttcttcggcgaccacttcgaagtagcgcaattggcgtagatcgatcatgtaagacctatggggactcaagttggtcgcagtatgtcttggacggtccgacctctgcaatctagcatctgttccacggtcacagcgaccctttgtactgttgagaatccatcatgaacttgaaagacaaactgcccggcgtccagggcttcggcaccgcccgtcctgccgctttaacttcaggagttcaaccatgaaaatcgatgtaagcggcaaagtagcgattgtcagcggcagcactgccgggatcggcctgggcatcagccaagcacttgcagcctccggcgccaccgtggtggtgatcgggcgtgaagccggcaaggtcgacgatgcactggcgagtatccgtcaggctgtcccaggcgcagacctgcgtgggctggtggctgaccttggcaccgcagagggcgcagagaaactcttcgccgccgaaccgcgtgccgacatcctggtcaacaatctgggcatcttcaacgatgtggattttttcgatgccccggacagcgaatggacgcgcttctatgaggtcaatgtgatctccggtgtacgcctggcgcggcattatgtgccgggcatggtcgggcagggctggggacgggtgatcttcgtgtcgtcggaatccggcgtggccaccccggcggacatgatcaattacggtgtgaccaaaagcgccaatttggcggtgtcccatggcctggccaagcgcctggcgggcacgggagtgacggtgaacgccgtgctgcccggcccgacctttaccgacggcctggagcagatgctcagggacgccacacaaaaatccgggcgcagcgcgcgggatgaggcggacgtgtttgtgcgcaatgcgcggccgacatcaatcatccagcgcgcggcaaatgtggatgaagtcgccaacctggtggcgtacattgcttcaccgctttcttctgcgacaaccggtgccgcattgcgcgtcgacggtggtgttgtcgacagcatggcgatctgaattgtttttcattttctggagtatttatcgtggcaacagcctcttctgtgattgaaatcccggtgtcggccgatcaggtctggcaattggtcggcggcttcaacagcctgccggactggttgccgttgattgtcaaaagcgagccaagcgatggtggccgtgtgcgtcacctgcaaacggcggacggcgcagtgatcgtcgagcgtttgcagagctttgataacgtcggacgtacctacagctacaccatcgagcagtcgccgtttccggtgagtgcgtatctggcgacgttgcaggttgaggcgctgacggacgcttcggcgaaagtgacctggtccggtgtgtttacaccagtggcggggactacggatgcggcggttgaggagctgtttgccggtgtctacagcggtggtcttgaggccctacgcgccaacttcccggcctgatccagtccaatgtgggagggggcaagccccctctcacattgggacgcccatgttctcaggcctcgggcatcagttgctggcggcactccagaaccaatctggcaccgccttgctcactcgtacccacgtccaacttgaagccatgcaagttgatgatcgccgccacaatcgacaagcccaatccaaacccaccttgctggtcgctttcatccacgcgatagaaacgctggaacaccgcatcccgctctgccgccggtatgcctggcccggagtcgtgcacttcaatgcgcgtgctgcccgcatcgttgaccccgcgcagaatcaccgcgccgcccgggggggagaacttgatcgagttgctcagcaggttggccagggcttcgaacaacagggcgcggtcgccggtgatccatggcagggactccggggtttcgagcttcagttgcagttcaccttcttcggccagtggcaggtagaagtcgtgcaactcgcgcagtagcggcagcgggtccatgaccaggaaaccggagcggcgctgatggtcctccagctcggagatgcgtaacagcccgcgaaagcgcgccatcagggtgtcggtctcggcaattgcatcgtcgagtttcaccgcgtagtcggactcggcctccgcctcctgcttgatgcgatacagctgcgcacgcaggcgcgtcagcggggtgcgcaggtcgtgggcgatgttgtcgcacacgcccttgacctcgttcatcagcttctcgatgcggtcgagcatggcgttgacgatggccgcgagcatgtccagttcgtcacgccggttggacagcggcaggcggtgggtgaggtcgccggcgacgatggcttcggcgctggcctggatcccacggatacgccgcaacgggcggcggcgcagcaagtgccagccggccgcgccgggaataatcgtcagggacaatgcccagagcagggcatgccagatgatccgggtcacgccgaacagcgaaccgttggcccgcaccagcaccagccaacggccgtcttcggtgtgagtggctacggcgtcgcagctgtctttgggcaatttggggtcgtcggactcgacgcaattggccagggcgtggatcttgccgtccagcggcaggtccggcgggatcgcacgaatcggcccgctcaaggggcggaattgttcatcgaacaggccgtaggcatccacgcccttcatgtcgaaggtcatgctggtggtcagggcctccaccagttcctcgccgtcgaagcgctggaacaggtgctggcgctgcatcagggagtggcgcgacaggtcgcccaggtaaccggacacctcgtaatacagcacccccatgaggatgcagctccaggccacgaacagcgagctgtacagcgccagcaggcgactgctggaggagcgccagcctttagaggggttcagcaatgacataaccggagcctcgtaccgtgcggatcagcggcgtgaggcccggtgggtcgatctttttgcgcagacggccgatgtgcacgtcgatcaggttggtgccggggtcgaagtgatagccccagacttcctcgaagatcatcatccgcgacaggatctgcccggtgttgcgcatcaggaactccagcagtttgtattcggtgggcagcaggctcaggggttgatcggcgcggctggcttcgcggctgatcaggtttagctccaggtcggccacacgcagggcggtttcgaattccttgaccgtacttttgcgtcgcagcaacacctcgacgcgggcggccatttcatccgaggcgaacggcttggtgaggtagtcatcaccgccggcacgcaggccacgcacgcgttcgtcaacgtcggagagggcgctgatcatcaggatcggcgtggaaacgccgatggtgcgcagggtcgtcacgatggccaggccatcgagttccggcagcatgcggtcgagggtgatcaggtcgtaatcgccgctcacggcgcggaccaggccttcgcggccgttgtctacccaatctacatccagtccatggctactcagctcggcgacaatctcgcgggccgttacggcgtcatcctcgatggtcaaaatacgggtcataggattacctggtgagcgattcacactagaagtgggggcattttgccaagaaacggctgaatgcttcctaaataaaacttcatgttggcaaaactgacacagatttcatcgcctgccggggaatgcataacgcccgcttcaaacggccatttcttgcaagttgcatggatcaggttagttcaatttacttaattcattgaaatctaaggattttattttttgtccaggctggcatggtgcctgcactgtcccttttgagacctgtaacactatttttctgccttggagcaaaacaacaatgatcacatcctcatccacgctgcaagagtcgagcgcgctctccggggtttcctggggggcgatttttgccggggccgccgccgcggctgcgctgtcgctgatcctggtgctgctgggcttcggcctgggcttttcggcagtgtcgccgtgggccgatagcggtatcagtgccaagggcttgggtatttccacgattgtttggctggcctttacccagatcgttgcatccggcctgggcggttatatcgccggccggttgcgcgtgaagtgggccaatatgcatggcgatgaggtgtactttcgcgacaccgcccatggcttcctggcctgggccgttgccacgctggtcactgcggtattggtggtcggttcggtcagcagtgtggtcagcggtggcgtgaaagccggtgccagcgttgcagccggtgccgccagcggtatcacccaagccgccggcagtgccgccaaaggtgccaacagcggcgatttcgattactacgttgacagcctgttccgtgatgatcgcccggtcgccgtcagcgatgacgccgcccatggcgtggtggcccgcatcttcacccgcaccctgagcaacgacggccagcttgcacctgaagaccgtgcctacctggcccagttgatcagccagcgcaccaacctcagccaggcggatgccgaagcgcgcatcgacaaagtctacggtgacgcccgtaaagcggtggaagacgccaagctcaaagccaagcaagctgcggaaaccgccgcaaaagtggctgcgtatacctcgctgtggaccttcgtcgccctgttgatcggtgcgttcttcgccagcctcgccgccacctttggcggtcgccgccgcgatgccgtggtgtatgtcgaaaccgaacacttcgttcgttaatcaattcaaggagaacaacatgcgctcattactgctctggttcctcggtgtgcctatcccggtgatcatcctgattgcgatcttcatgcactgatcctcgctcaggtttctcaaggccgcgtctgtttccacaggcgcggctttttttgtcttacgggtacgaaggcttatacctgtcaagtttgacagtatcgccgggctctgaaagtgcctagtttgtttaagtcccaactcactgagagcacggtcatgaatcaaactaccggcacattgacggcaactgtcgtcaacccacaagtcattccaccgaaccaaccgtttattggcgatcccggtgaaatgctgatgtaccgatcaggtggatatatacacattgcggcaacgcaaaggttgggacccacggtcaatgatttcaacggtttcaattttcgtataccgaacatcattgcgggcagtgggtcgcacaccttcgtgcttggcgttactgctcggggtatctattgggctcatgagcttggtggtgtcacgccgtacacggctgtaaatggcagtctcactgtttcattggaccagaaggacacgttgacggggacgttcaacttcccgggagaaaacggcagccaacacatcagtgtcagtcagggccagatcgacctggcgggctttattacccagccagtaccggtacggctgccaacggttacaggtacaggctatatgcgaggagacgtcgtaggagggcctttgccaaaccagaactttgacgcggcagttgtcagcctcagggaagtcgatggcggcggcatcagcaagaactactttgaattcattggcaggcagtacaacgagttaggaattcagaactatgttgccatcttgctggacgttgaccagacggcgcttacctacgtgttagggagtaaccgtgaagcccgagctcttttcgcggtgatggactcctttgggtttgcgtatgccatcagcgggtcgttgaacttcacctctctgcctgccagcggtcgcgcagccggcagcctcgactgcatggtgcagaagaatcaggagccacccttccatgtcaatgttgtgttcgatatcacagcttaggttcagccagcggacctgatggggtaacggccaacgtctcacgcaattgttaatagcggcttaacccgtgcttggctagactcgcgccccatgagccgccttctgcgtttagtcctggtcctgctgctgagcctcacgcttcccctgacagggatggcgggtgtgccgtcgagcaccgagccctgcccgatgaaaatgtcgggcatgccgatgatgagcgacatgtcgcccgactgctgtcaggacggtgctgaacatggcaaagcctgcaagcccggccaggaatgcaagaccggtagcctgctgcaactgtccctggcggtgctcaaggcgccgttgccctcggcctatccgctgcgcgtcagcgcctcttcggaattcatccctgaccgcacgccatccggcgtctggcgcccaccccgttcctgacccctgttgcacctcaagacgcatcccctgaccgggatggttttgctgtgggccgcctgacgcggtgcacagcgcaacggaacaggaattttcaacatgaatgcctcctacatgcgcgccctggtggtgggcgtgctggcgtggccggcgttggcgagtgcgctgaccctggatgacgccctgcgcctggcgcaaaacaatgcaccgtcgctgcaggccgagtcggccaagttgcaggccgccacccaggcggcgatcccggcgggcgaattgcctgaccccaagctggtggtcggcctgcagaactttcccattggcgggcccaatcgcggcacgttgtatggcgacgagatgacgcaacagatgatcggcatccagcaacaggtgcccagccgcgacaagcgcaaggcccgggtcgagctggccgatgcaaccatcgaacgggcagctgccgaggggcgcatcgagcgcctgaacgtgcgccaggccacggcccaggcatggattcgggcgtatgcggtcgcgcgcaagcaagccttgttcaaggacttctaccaacagaaccgtctgctgcaagacaccgtgcgtgcgcagttggccggcggccgtggccaggccgccgacgcggtcatcccccggcaggaagccgccgagctggccgggcgcgacgatgagttgacccagcaacgtgcccaggcccgtgccgcgctcaagcgttggatcggcgcggccgctaacgaagctcccagcggtcaactgcccaactggaccttcgacccccacagcctgaaccacaacctgcaccagcacccggcactgcaagcctacgtgccgcgcacccgcgaagcgcaggcgcgcttgcaggatgcgaaggcgcaaaagacttcggactggagttgggaggtcgattacgggcaccgcagccgtgagttcggtgacatggtcaacgtgcagttcacctttgacctgccgatctttcccggccgtcgacagaaccccggcatcgccgccaaacaggccgaactggaccagcttgacgccgagcgcgcagccgcgacccgtgagcatacccagatgctcgatgacgacctggccgactaccagcgcctggaccgcgcggtacagcgcagccaggacagcctggtgccgctggccgaggaaaaagtcagcctgagcctggccggttaccgcgccggcaaaggcgacttgatgacggtggtcaacgcccgccgtgagctggtcgaagcccgtttcaagcagatcgatgccatcgaacaacgcgccctggtcggcgcgcagttgtatttcgcctatggggaacccgccaatgaataatcgaatcgtggccgctgtgttgctgctgggtctgggggccggctatgggctggcgcagtggcagcccggggcacccgcaatgcccgtaaaatccgacaagcaggcgctgtactggtatgacccgatgttcccgcaacagcagttcgataagcccggcaagtcgccgttcatggacatgcaactggtgccgcgctacgccgatggggcggtatcgacggctacgccggcggtgcagatcgatccgggcctggcgcagaacatcggcgtgcgcctggcgagtgtgagccgcggcgtgctgacctcccgcctggacctgtcgggcatcctggccttcaacgagcgtgatgtggcggtggtgcaggcgcgggcggcggggtttgtcgagcgggtctacgcacgggcaccgggggatgtgctcaaggccggtgcgccgttggtggacctgctgatacccgagtgggcggccgcccaggaagagttcctggccctgcggcgcagcggcgagcccggcttgatcgacgctgcccgccaacgcctgcgcctgagcgggatgccggcggggttgattgcgcagatggaacgcagcggccaggtgcagtcggtcttgaccgtgaccagcccgatcagcggcgcgctgcaaaccctcgacgtgcgcgaaggcatgaccgtggcgccggggcagaccctggcgcggttcaacggcctgggctcggtgtggttgcaggtcgccgtgcccgaagcccggggggccacgttgaaagtggggcaaaccgtgcagagccgcttcgtcggtttgccgggcgagacgctcgacggcacggtcagcgcgatcttgccggccaccgccacggacagccgcaccgtgcaagtgcgggtcgagctgcccaaccccgaaggcgccctgcgcccgggcatgaccgcccaggtcagcctggcgcagaccagcgggcaagcgttgttgcaggtgcccagcgaagcattgatccgcaccggcaaacgcgtgctggtgatgctggccgaggagggtgggcgctatcgtccggtcgaggtcgaaaccggcgcggagaaccaggatcgtacggtgatcctcagtggcttgcaggaaggtcagcaggtggtcgcgtccgggcagttcctgctcgactccgaggccagtctcaagggcattaccgccaccgctgcggaagctgcgatgaacatgcagccgggagcccagccatgatcgcgctactgattcgctggtcggtggccaatcgtttcctggtgctgctcgccaccttgttcgtcaccgcgtggggtgtctggtcggtgcagaacacacccgtcgacgctttgccagatctatcggatgtgcaggtaatcatccgcaccccgtacccgggccaggcgccgcagattgtcgagaaccaggtcacgtacccgatgaccactaccatgctctcggtgccgggggccaagaccgtgcgcggtttttcgttcttcggcgacagctacgtgtacgtgttgttcgacgaaggcaccgacctgtactgggcgcgctcgcgggtgctggaatacctcagccagttgcaggcgcggctgccggcatcggccaaaccgtcattggggccggacgccaccggcgtgggctggatctaccagtacgccttggtggaccgcaccggccagcacgacctggcgcaattgcgcgcgttgcaggactggttcctcaagttcgaactcaagaccctgccgaatgtggcggaagtcgccaccatcggtggccaggtcaagcaataccaggtgcagctcgacccgctggccctggccagtcgcggcatcacccaggcgcaggtgaaagcagcgattgaccaggccaaccaggaagccggcggctcggtattgaacctgggcgagtccgagtatgtggtgcgtgcctccggctacctgaagaatctctctgacttccgcgccatcccgctgcgcctcgacgccaacaatgtaccgctcaccctcggcgatgtggcgaacatccagctcggcccggacctgcgccggggcatcagtgagctggacggcgagggcgaagcggtcggcggcgtggtgatcctgcgcagcggcaagaatgcgcgggaagccatcgcggcggtcaagaccaaactggaacagttgaaaagcagcctgccgcccggtgtggaaatcgtcaccacctacgaccgcagcaagctgatcgaccgtgccgtggacaacctcagccataaactgctggaagagttcctggtggtggccctggtgtgcgggattttcctgtggcacctgcgctcgtccctggtagcgatcatctcgttgccggtgggggtgttgatcgcgtttatcgtcatgcgcttgcagggcatcaacgccaacatcatgtccctgggcggtattgcgattgccatcggcgcgatggttgatgcggcggtggtgatgatcgaaaacgcccacaagaaaatcgaagcctggcaccacgccaaccctggccgggaactcaagggcgatgcacattggaaggtgatgacggacgcggcggtcgaggtcggcccggcactgtttttctgcctgctgatcattacgctgtcgtttattccggtgttcaccttgcaggcccaggagggccggctgttcgggccgctggcctacaccaagacctacgccatggcggccgccgccgggttgtcggtgaccttgatcccggtgctgatgggctactggattcgcgggcgcatacccgacgagcaacgcaacccgctcaatcgcggcctgatcaagctctatcagccggcgctggaggcggtgctgcgctggccgcgcatgaccctgctggtggcgctgctgatggtggcgagcgcgctgtggccgatctcgaaactgggcggtgaatttctgccgccgctggatgagggcgacttgttgtacatgccttcggcgctgccgggtttgtcgacacagacagcgggtgaactgctgcaacgcaccgaccggctgatcaagacggtgcccgaagtcgcccatgtgttcggcaaggccggccgcgccgaaaccgccaccgacccggcgccgctggagatgttcgagaccactatcgagttcaagcccaaggaccaatggcgtcccggcatgaccccggacaaactggtcaaggaactggaccgcgtggtgcaggtgccgggcctgaccaatatctggatcccaccgatccgcaaccgtatcgacatgttggcgaccggggtcaagagcccgattggcgtgaaggtcgcgggcaccagcctgatgcagatcgatgcggtgacccaggccgtggagaaggtcgccaagactgtgccgggcgtgagttcggcgttggccgagcgcttgaccggcgggcgctacatcgacgtcgacatcgaccgtgccgccgctgcgcaatacgggctgaacatcagcgatgttcagtccatcgtgtcgggtgcggtgggcggtgaaaccattggcgaaaccgtggaaggcctggcgcgtttccccatcagcctgcgttacccgaaggaatggcgcgactcggtggaagcgctgcgcaacctgccggtgtacacgccacagggcagccagatcaccctgggcacggtggccaggatcaaggtcaacgatggcccgccgatgctcaagagtgaaaacgcgcggccttccggttgggtgtatatcgacgtgcgtgatcgtgacctggcttcggtggttcgggacctgcgtgcggcgatcaaccagcaggtaaagctgcaaccgggcatgagcctcagctattcggggcagttcgagttcctcgaacgcgccaatcagcgtctgaaactggtggtgccggccaccttgctgatcatctttgtgctgctgtacctgacctttcggcgggtgggggaggcgctgctgatccttgcgaccttgccgttcgcgttgaccggcggcgtgtggctgctttactggctgggcttcaacctgtcggtggccacgggcgtgggctttatcgcgctggcgggggtgtcggcggagttcggcgtgatcatgtggctgtacctgaagaacgcctgggccgagcgcaaggatggcaatctattggcggccatcaccgaaggtgcggtgctgcgggtacggcccaaggcgatgacggtggcggtgatcattgccgggttactgccgattttgctgggcagcggcaccggcagtgaggtgatgagccggattgctgcaccgatgattggcgggatgctgacggcgccgttgctatcgctgttcgtcattcccgcagcctactacctgatgcgccgccgataaacatgtgggagggggcttgcccccgatagcggcggatcagacacaaatccagtgactgacacacagctatcgggagcaagctccctcccacaagggatctccaacgccggcaggttcagtcgtcgaacccgacctgctcgtgaatctcatccaccttcaactccaaccggtacgccaccgcgataaacaacgcctggcacaggcacaaggtggcgctcaacgagcggaaggcaaacgacgagccttcattcaccaacagcactgcgttagcccgcttggccaggggcgacaggttgctgtcggtgatgatcagcgtcttggcctggtggtgctgggcgatgcgcaggcagtgctgggtctctttaccgtagggcgtgaagctgatggcgatcaccaggtcattggcgcgcacgctgcgcatctgctcgcggtagctgccgcccaggcccgagatcaggtggatgcgcttgttggtgtgctgcaggttgtagaccaggtagtcggccaccgcaaaggaacggcgcacgccgaccacgtagatattgtcggcgttgaccaccaggtccacggctttgtcgaaggcgacatcatccagctccaggcccaggcgctcgatgcccgacagcgtggcgttgacgcattcgcgcgccaggtcgccgccgctggctttctgcgacttgttggcgatcatgctgcggatgcgctgctggtagttctgcaccggcgtggtcttgtgggtgtaggcctcgcggaacagcgcctgcatctcactgaacccactgaacccgaaacgctgtgagaaacgcacgatggccgacgggtgcacttcgcattcgcgggcgatgtcgctgatgcggtcgaccatgatccggtcgctctgctggctcatgtagctggcgatgcgcttgagctggcgcggcaggctctcgtattcgtcggtgattagctgcaacaggcgctcggcattgatcggagggctggcgatagagtcttccagggtggtctcgggatcggtgcgggacatgggcaatccttctggcgttttcgtctgttgcgctgatgggtggcgcaagtctacagggtaggcgcaaaaaaataccccggcatcacggccggcgtggcctgctgaaacgatgcactgtggtgggagcgcccctgtacgagcttaatggaaaaaatattccaatgaaaaaatatctggaataaatattgattggcgccgccggacgttctagtctgctcccaccaagagcgtttgccgcccccacggcggcacaacgcaggctgataaaaataacaggagccagcatgggccagactcgttttgccagtgggcgtcaattggatctgatttgcctcgggcgcctgggcgtcgacctctatgcacagcaagtcggtgcgcggcttgaggacgtgtccagcttcgccaagtacctcggcgggtcctccgccaatatcgccttcggcaccgccaggctcgggctcaagtcggcgatgctgagccgggtcggcgacgaccacatgggccgtttcctggtggaatccctggcccgcgagggctgcgatgtcagcggcatcaaggtcgacccggaacgcctcaccgccctggtgctgctcggcctcaaggaccgcgaaaccttccccctggtgttctaccgcgaaaactgcgccgacatggccctgcgcgccgaggacatcaacgaagcctttatcgcgtccagcaaagccctgctgatcaccggcacgcatttctccaccgacggcgtgtacaaggccagcatccaggccctggattacgcggccaggcacaacgtcaagcgcgtgctggatatcgactatcgcccggtgctgtggggcctggcgggcaaggccgatggcgaaacccgttttgtcgccgaccagaatgtcagccagcacgtgcagaagatcctgccgcgcttcgacctgatcgtcggcaccgaagaagaattcctcatcgcgggcggcagtgaagacttgctcgctgccttgcgcaaggtgcgtgaactgaccccggcgaccctggtggtcaagctcggtccgcaaggctgcacggtgatccacggcgccatccccgcacgcttggaagacggcgccatctaccccggcgtgcgcgttgaagtccttaacgtgctgggggccggcgatgcgttcatgtcgggcttcctcagcggctggctcaacgatgccagtgatgagcgttgcagccagttggccaatgcctgcggtggcctggtggtctcgcgccacgcctgcgcaccggccatgccgacgccggcggagctggaatacctgttcaacagcccggtgccgatcacccgtccggaccaggacgtgaccctgcaacgcctgcaccgcgtgacggtgccgcgcaaaagctggaagcagctgttcgtgtttgccttcgaccatcgctggcaactggtggacctggcgcagaagggcggccaggacctggcgcgcatcagcgaggccaagcaactgtttatccaggccatcgaacgcgtcgagcaaaagctcgccgaacaaggcgtggaagccgatgtcggcctgctcgccgaccagcgcttcggccaggacgcactcaacgccgccagcggccgtggctggtgggtcgcgcgcccggtggaagtgcagaactcgcggccgctggtgttcgagcatggccgttcggtgggcagcaacctgatcgcctggccccaggaacagatcatcaagtgcctggtgcaattccacccggacgacgaaccgctgctgcgcctggaacaggaagcgcaattgaaagcggtgtacgaggcgtcgattgtcagcgggcatgaactgctgctggaagtcatcccgcccaaggaccacccgtccacgtatcccgacgtgctctatcgcagcctcaagcgcctgtacaacctgggcatctacccggcgtggtggaagattgaagcgcagtcagccgaggactggcagaagctcgacgccctgatccaggagcgcgatctgtactgccgaggcgtggtgctgctgggcctgaatgcctcggccgaatgcctcgccgatggcttccagcaggcccgcctgagcactacgtgccggggttttgcggtgggccgcacgatcttccaggaaccgagccgggcgtggatggccggcgagatcgacgatgaaaccctgatccaacgggtgcaagccacctttgaacagttgatcaacgcctggcgcagctcccgaggctaaacccaattcctgatttgaaatgcaatccaatgtgggagggggcttgcccccgattgcggttgttcagtgacagcagtggtgtctgacactcagctatcgggggcaagccccctcccacatacagcaaaaagcagatctcagtgatacctgaaaataataaaggtgcagccatgcccgcaatccgaattggcatcaacccgatctcctggagcaacgacgacctgccggccctgggcggtgaaacgcccctgagcaccgccctgagcgaaggcaaggaaatcggctacgaaggcttcgaactcaacggcaaattccccaaggacgccaagggcgtcggcgacgtattgcgcccgtacgacctggcgctggtctctggctggtattccagccgcctggcccgacgctcggtggcggaagaaatcgcggccatcgccggccatgtcgagttgctcaaacagaacggcgccaccgtactggtctatggcgaggtggccgattcgatccagggctcgcgcatccgcctgatcgaacgcccacgtttccacagcgaacaggcctggcaggactacgccgacaagctcaccgaactggcgcgcttcaccctgtcccagggcgtgcgcctggcgtatcaccaccacatgggcgcctatgtcgagtccccggaagacatcgaccagttgatgcagcgcaccggccccgaagtcggcctgctgttcgattcgggccattgctacatgggcggcggcgagcccatagaggtactgcgcaagcacatcgaccgcgtctgccatgtgcatttcaaggacgtgcgcaaaccggtggtgcaactggcgcgcaaccagatgtggagttttcccgactgcattgtcaacggcactttcaccgtgcccggcgatggcgatatcgacttcgccgaactgctcgatgtgctgctggccgcccactatgaaggttggctggtggtggaagccgagcaggacccggccgtggcgcccagctatctctatgcgaaaaaaggctacgacaccctgcgtgcgcttctgaatgagaggaccggacaatgagcctgttggtcaaaagcagcaaacgcggccagaccatggtcgccctggaacccgggcgcctggagtacgtggggttcgccgcctaccgcctgagcctgggcgaaaccctgccggtcagcgccggtgaccaggaactgtgcctggtgttgctcagcggccgcgtgaacatcgagggcgagggcttcaactggcagaacctgggcgatcgccagtcggtgtttgaagacaaatcaccgttcgccgcctacctgccgccgggcaccgatgcccaggtcaccgccctgagtgatgtgcagattgcggtctgcgccgcgcccggcgccgaaggctacgaaccgcggctgatccgcccggaaacctgcaagcgcagcgtgcgcggcaaaggtgccaacacccgctacgtgtgcgacatcctgcccgacagcgagccagcccattcgctgctggtggtggaggtgcgcacgccgtccgggcattcatcgagctacccgccgcacaaacacgacaccgatgacttgccgcgccagagcttcctcgaagagacctactaccaccagatcaatccgccccagggctttgtgttccagcgcgtctataccgacgaccgcagcatcgaccaggccatggccgtggaaaacagcgacctggtcgtcgtgcccaagggctatcacccggtcagcgtgccctatggctacgagtcctattacctgaacgtgatggccggccccaagcgcgcctggcatttccacaacgacccgcagcacagctggctgctggacctctaatcagcggttccggacggagaataacaacaatgaagtcgcctctacgtttcgcccttaaccgcatcgtcgcgcccaacctgtccctgccggatttcatccagctggcggcggcgctcaagtgcgatgccatcgagttgcgcaatgacctggcggacaagcagatcgagttcggcaccccggccagccgcgtgcgcgagttgtgcgcggtgcagggcatcacggtgctgtcgatcaacgcgctgtacccctttgacgtgtggaacgacgagcgtcgtgcccaggcaatcaagctggcgacctacgcccgcgagtgcggcgcccagggcctggtgatgtgcccgctcaacgagccgggcgacacgcgcaacgaggcccagcgtgcggccggcttgcgcacggccttgagcgagctggcgccgatcctgcgcgagtacggcatcctcgggtttatcgaacccctgggctttgaagagtgtgcgctgcggcgcaagcgtgtggcggtggacgcgatcaagtccatcggcggcctggatgtgttccgcctggtgcacgacaccttccatcatcacctggccagcgagcatgagttcttcccggagttgaccggactggtgcatatctccggcgtcgaagataccgaggcgccgctgagttcgattcgcgacggccaccgtgttctggttggcgagggcgacatcctcggcaacgcggcgcagatcgacaccttgctcagcaccggctacagcggctacctgtcgttcgagccgtttgccgagagcgtgcacgggctggcggatatccagcaggccttgggcgcaagcatcgcccacctgcagaaacgataaggggcgcgacatgaccacaacccgactgaccatggcccaggccctggtgaagttcctggacaaccaatacatcgaagtcgatggcgtgcagagcaagttcgtcaccggggtgttcaccattttcggccacggcaacgtgctgggcctgggccaggccctggagcaggacagcggcgacctggtggtgcaccagggccgcaacgagcagggcatggcccatgcggcgatcgggttcgccaagcagcacctgcgccgcaagatctacgcgtgcaccgcctccgtaggcccgggggcggccaatatgctcaccgccgccgcgaccgccacggccaaccgtattccgttgctgttgttgcccggcgatgtctacgccagtcgccaacccgacccggtgttgcaacagatcgaacagttccacgacctgagcatcagcaccaacgatgcctttcgctccgtgagcaaatactgggaccgtatcaaccgccccgagcagttgatgagcgccgcgatccacgccatgcgcgtgctcaccgacccggctgaaaccggcgcggtgaccctggcattgccccaggacgtgcaggccgaggcctgggattatccggattacttcctgcaaaaacgtgtgcaccgtatcgaacggcgcccggccacccgcgcgatgatcggtgatgcagtggccgccttccggggcaagcgcaagccgctgatcatctgcggtggcggggtgaagtactcaggcgcgaatgccgcgctgcaagcctttgccgagcgctttgatattcctttcgccgaaacccaggcgggcaagagcgccgtggtctccagccatccgctgaacgtgggcggtattggcgaaaccggttgcctggcggccaacctgctggcgcccgaggccgacctgatcattggggtgggcacgcgttacaccgatttcaccacctcgtccaaatcgctgttcaagcacccggaggtgacgttccttaacctcaacatcagcccctgcgatgccttgaagcttgacggcgtgcaagtgctggctgacgcgcaggtagccctcgaagcattggcggatgccctcggcgattatcgctctggctggggtgggcaggtcgtcgaggccaaggcgcagttggacgccgaagtggaccgtgtgcaccaggtggaatacgacggcgacgcctttgtgcccgaggtcgacgaccgccttgaccgtggcgtgctgcgtgaattcatcgagctgaccggctcgtgcctgactcagagctgcgtactgggcgtgctcaaccagaccctggccgacgacgcgatcatcgtcgccgccgcgggcagcctgcccggcgacctgcaacgcgcctggcgcagcaagggtgtcaacacctaccacgtcgaatacggctattcgtgcatgggttacgagatcaacgcggcgctcggcgtgaaactcgccgagccgactaaagaggtgtacgccctggtcggcgatggctcctacatgatgctgcactcggagctggccacctcgatccaggagcggcgcaagatcaacgtggtgctgctcgacaacatggcgttcggctgcatcaacaacctgcagatcggcaatggcatggacagcttcggcactgaattccgctaccgcaaccctgagagcggcaagctcgacggtggcctggtgccggtggacttcgctatgagtgcggcggcctatggttgcaagacctacaaagtcagcacggtggagcaactcgaagcggcgctggcggatgcgcgcacgcaaacggtgtcgacgctgatcgatatcaaggtgctgcccaagaccatggtccacggctacctgtcgtggtggcgggtaggggtggcgcaagtgtccaccagcgaacgcacgaatgccgccgcgaaaaaactcaatgaacacctggcgaaggcccggcagtactaataacaagaggagtgtttgtatgtctttgaagctaggtgtcatcggtacaggcgctatcggccgggaccatatccgtcgttgcagccagaccttgctcaacagccaggtggtggcggtgactgacatcaacctggagcaggccgccaaggtcgtcgccgatttgaagctggacgctgaggtgtacgccgacggccatgcgttgatcaactcgccgcaggtcgaggccgtgctggtgacgtcctggggcccgagccacgaagaattcgtgctcgccgccatcgccgccggcaaaccggtgttctgcgaaaaacccctggcggtcaccgccgagggctgccgcaagattgttgacgccgaggtagcttacggcaagcgcctggtgcaggtcggcttcatgcggccgtatgacgaaggctatcgcgcactcaaggctgtgatcgacagcggccagatcggcgagccgctgatgctgcactgcgcgcaccgtaacccgacggtggtcgaaaactacaagaccgacatggcgatcaccgacaccctgatccacgagctggatgtgttgcgttggctgctcaacgatgactacgtgtcggtgcaggtggtgttcccgcgcaaatccagcaaggccctggcccacctgcgtgacccgcagatcgtgctgctggaaaccgccaagggcacgcgcatcgatgtggaagtgtttgtgaactgccagtacggctatgacatccagtgcgaagtggtgggtgagaccggtatcgccaagctgccggagccttcccaggtgcagatgcgcagtggcgcgaagctgtccaacgcgatcctgatggactggaaggatcggtttatcggcgcgtatgacgtggagttgcaggcgttcatcgacagcgtgcgcgccggacaggtgggtgggccgtcggcgtgggatggctttgcggcggcggtggcggcggatgcgtgtattgaagcgcagggcagtgagcagattgtgaaggtgagcttgccggatcgcccacgtttctacggctgaatcactgaagaaatgctgtgaaaaatgtgggagggggcttgcccccgatggcggtggatcagatagatattcattgactgacacactgtaatcgggggcaagccccctcccacagttgaatcgggttttcacttcaagcaaggagtgtaggtatgcgaatcggactagtcggctacggccatggagggcgcttctttcatgcgccgctgattgccacattggccggtgccacatttgtcggcgtggtcaccaggtctgcggaacgccgccagcaactggcaaccgaccacccaggcctcaaggccttcgactccatcggccagatcgtcgaagccggcgtcgatgccctggtcatctccaccaccctcaagggccgccccgcgctggtgcttgaggccatcgaacacggcgtagccgtggtcagcgacaaacccttcgccgccaacgccgaacaggcccaggccttgatcaccgccgctgaacgccagggctcgttgctcagcgtctaccagaaccggcgctgggactcggactacctgaccctgcgcaaactgatcgacgctggcgccctgggcacaatcacccgtttcgaatcccgcgtggaacgctacagcccgcaagccgtgggcaacgccagcggtggcggctggttgcgcgacctgggcagccacctgatcgatcaggccctgcaactgttcggcccggttgaccgggtgttcgcccaactgcactacaccgccgaacaccctacggtggaccatggcttctttgtctccctgacccatgccaacggcgtcatctcgcacctgtggggcaatgccctgcaaaacagccaggcgccacgctttcgtgtgagcggcacctccgggtgctacaccgttgaaggcctggacggccaggaagaggccttgatggccggcaagtcgccgaaaaccgaaggcgagcactggggggcggaagaacaccgacgctggggctggttcgaacaaggcccggaacgcgagcgggtgccgtcggagaagggctgctggacgcagttctatcggcagttgcaagtggctgtgcaagggcagggaccgctgccggtggacgcctatgatgcactggaaaccacccgtatattggacgccgcacgcctgagcgccgagcgccagcaggtggtttcaacaaaaatagaataaaattctaaaacaggttgatatggaaattattttccaataaagtcttttccaggttgcataaagtacgttcggactcgatccgcacgactcaacaaaaacaagatcaaaaacaaccaggtaccgtcagatgaaaatcttcaacgctgtactgcgagttttacaccctgcccacacgccacgcgatctgccccgcgcccggccgttttacttctccttccttaatgtgctgtgcgtcgaaaaccaaggcgcgctggtctgctgcattcccggcgcaccggtcgtgcggctgcctgccgagctctgataaacgcaacgtccaaaaaaccaacaagaaagtggagacagaccgttcatgaagaccccgatccgttttaccgcgctggccttgtccatgctgctcgccagcggtgttgccgcggctgccgatctgaagataggcgtgagtatgtccgccttcgatgacaccttcctcacctacctgcgcgaagacatggacaagcaagccaagtcctaccccaagggtgacggcgtgcagttgcagttcgaagatgcgcgtgccgacgtggtcaagcagttgagccaggtcgagaactttatcagccagaaagtcgacgcgatcatcgtcaacccggtggataccgcctcgaccgccaacatcatcaaggccgccaccgcagcgaaaatcccgctggtgttcgtcaaccgccgtcctgacagcccgaccctggcgccgggcgtcgcggcggtgacctccgacgacgtcgaggccggcaagttgcagatgcagtacatcgcagaaaaactcggcggcaagggcaacatcgtgatcctgctgggcgacctggcgaacaactccaccaccaaccgcaccaagggggtgaaggaagtcctgagcaagtacccaggcatcaagatcgagcaggaacagaccgggatctggctgcgtgacaagggcatgaccctggtcaacgactggctgacccagggccgtgaattcaacgcggtgttggccaacaacgatgaaatggccatcggcgcgtccatggcgctgaagtctgcgggcaagaagggcgtgttgatcgccggtgtcgacggcacgccagacggcttgaacgcgatcaccaagggtgacatgaccgtgtcggccttccaggatgccaagggccaggcggacaagtcggtagagaccgcgcgcaagatggccaagaacgagcccatcgagcagaacgtggtgatcccgttccagctgatcaccccggacaacgtcaaagacttcaagtagtccctacataacaacaataagccggcagggcggtcgtgcccgccttgccgatggagtacctccctatgctcgctcaagccgctgtctcgcagcctcccggtatccagccgctgccgctggacgaaccctacctgctggaaatcgtcaacatcagcaaaggctttcccggcgtcgtggccctggccgacgtgcagttgcgcgttcgccctggcacggtgctggcgctgatgggcgagaacggtgcgggcaagtcgacgctgatgaagatcatcgccggcatctaccagcctgacgccggcgagattcgcctgcgtggcaagccgattgtgtttgaaacccccctggcggcccagaaggccgggatcgcgatgatccaccaggaactcaacctgatgccgcacatgagcatcgccgagaacatctggatcggccgcgagcagctcaacagcctgcacatggtcaaccaccgcgaaatgcatcgttgcaccgccgagttgctggcgcgcctgcgtatcaacctggaccccgaggaacacgtgggtaacctgagcatcgccgaacggcagatggtcgaaattgccaaggccgtgtcctacgactccgacatcctgatcatggatgaaccgacctcggccattaccgagaaggaagtggcccatctgttttcgatcattgccgacctcaagtcccagggcaaaggcatcgtctacatcacgcacaaaatgaacgaagtgttcgccatcgccgatgaagtggcggtgttccgcgacggccagtacatcggcctgcagcgcgccgacagcatgaacagcgacagcctgatctcgatgatggtcggccgtgagctgagtcagctgttcccggtgcgcgagacgcccatcggcgatctgctgctgtcggtgcgcgacctgagcctggacggcgtgttcaaggacgtgtccttcgacctgcatgccggcgagatcctcggcatcgccggattgatgggctcgggccgcaccaacgtggccgaaaccattttcggcatcacccccagcagcagtggccagatcaccctggatggcaaggcggtacgcattaccgacccgcacatggccatcgagaaaggcttcgccctgttgaccgaggaccgcaagctcagtggcctgttcccgtgcctgtcggtgctggaaaacatggagatggcggtactgccgcactacaccggcaacggctttatccagcagaaagccctgcgggcgctgtgcgaagacatgtgcaagaagctgcgggtgaaaaccccctcccttgagcagtgcatcgataccttgtccggcggcaaccagcagaaggccttgctcgcacgctggctgatgaccaacccgcgcctgctgatcctcgatgaaccgacccggggcatcgacgtgggtgccaaggccgagatctaccgcctgatctcgttcctggccagtgaaggcatggcggtgatcatgatttcctccgagttgcctgaagtgctgggcatgagcgaccgggtcatggtgatgcacgagggcgaattgatgggcaccctggaccgcagcgatgcaacccaggaaaaagtcatgcagttggcctccgggatgaccgcagtccactgatgtacagaataaaaaggtgatgggctatgaacgcaataacggataacaaacctgcgacggtgccaaccaaaagtcgccgacgcatgcccaccgagctgagcatcttcctggtgctgatcggcattggcctggtgtttgaattgttcggctggatcgtgcgcgaccagagcttcctgatgaactcccagcgcctggtgctgatgatcctgcaagtgtcgatcatcggcttgctggcaatcggtgtgacccaggtgatcattaccacggggatcgacctgtcttcaggctcggtgctggcgctgtcggcgatgattgccgccagtttggcgcagacttccgacttttcccgggcggtgttccccagcctgaccgacttgccggtatggattccggtggcgatggggctgggtgtggggctgttggcgggggcgatcaacggcagcatcattgctgtcaccggcattccgccgttcattgccaccctgggcatgatggtttcggcccgtggcctggcgcgttactacaccgaaggccagccggtgagcatgctctcggactcgtacacggccatcggccatggcgcgatgccggtgatcatcttcctggtggtggcggtgatcttccacatcgccctgcgctacaccaagtacggcaagtacacctacgccatcggcggcaacatgcaggcagcgcgcacctcggggatcaatgtcaagcgccacctgatcattgtctacagcatcgccggtttgctcgcaggcctggccggcgtagtggcgtcggcacgtgccgcgaccgggcaggcgggcatgggcatgtcctatgaactggatgcgattgccgctgcggtcatcggcggtaccagcctggcgggcggggtagggcgcattaccggcacagtgatcggcgcgctgatcctcggggtgatggccagcgggtttacctttgtcggggtggatgcgtatatccaggacatcatcaagggcctgatcattgtggtagccgtggtcatcgaccaataccgcaacaagcgtaagctcaagcgctgattcaataccctgtcgaacacgggataaaatgtgggagcgggcttgctcgcgaaagcggtgtatcagtcaaagatgtgttgactggcagacggcattcgcgagcaagcccgctcccacatggggtctatcgctgacctgtgctaaccgtttgtcttctatatagctccacaacactgaatttcttgctataaacgcactccgataaccattcgccaagcccgtcctggtgccttttggggttatccgggaaaaaatgcctgtcatttcagttgctgcgccctcaagtcggccttagactgccgcccctcgtaaattgagtgccgggtggcgcttgaaatggacggcgcctttccgagacctgcagaggccttccggaacgctcccttattcgccttaatgcacgtattttttatagagaaatcaatgacaaaggaaaagttgctggccatgccggcggatgactacatgaatgccgaacagcacgcttttttcgagaagttgctgcaagacatgaaagtggaacaccacgagcgcattgaacagaaccgtatcgccattgaaagcctggataccccggccgacccggccgacgccgcttccgtggaagaagagcgtacctggctggtcaacgccatcgaccgcgaccagcgcatgctgccgcagcttgagcgcgcgttggagcgcatcaaggaagattcctttggctggtgtgatgacagcggtgagcctatcggcctcaagcgcctgctgatcagccccaccaccaagtactgcatcgaagcgcaagagcgccacgagcagatcgacaagcaccagcgccaagcctgatgcggtgaagctgggggaccgccacgcggttccccagggcaagacccgttacgccctgtctattgatctgctgcaagctaccccactaaaggcccatggataatggcccgatagtggcgtttaatgcagcgacaataatgacaagcagtggggtaacgaagatggctggagacggatctctgatgggcgcagctgtgtcaccgcaaccggtggtacgcgggctgcccggctggctcacgccgttgttgcagagcaccgccctggtgctggtactgctgggcctcgtgtttgccaacttgccgctctacctttgcctgccactggccgtgctggtgatctggctgcctcgcctgaaaaatcgtacgccggttattgcgccttccgacaccgccgatgccattggcgagttgacccgcgacctgtcctataccaccagccataacgcactctccgccgccggcgtggcctattcggtcaagcaactggcggcgcgcctgcagtcgcagttgagtgcggccaagcagatcgtcagcagtgccgaagtgatgatcggcactgagaaggtgacgtcccagctcagccgtgaggcattgagcgccgcgagccaggcccatcagcgcagcaccgaaggccgtgaagtgctggcccagtcgatcagccgcatgcaccagctcagccagcgtgcgaatgccagccgtgagctgatcgaagccttgagccagcgcagcgaggaaatccagcgcgtgaccctggtgatccagtccatcgccagccagaccaacctgctggcgctgaacgcggcgattgaggcggcgcgggccggtgaacatggtcgcgggtttgccgtggtggcggacgaagtgcgcgggctggccgggcgtaccgccacggccaccgatgaagtcggtgtgatggtggccgacatccagcaacgcactgcccaggtggtggagcagattcgccagctctcggcggacctgcacaccggtgtcgagcaggtagagcacgctggcgagcagctgcaaaatatcgccagcctggcggcggatgtggaaggccaggtcaatgaaattgcccagggcaccgacaccaaccgcacccagctcgatagcctgttccatgccgtggagcagatgcgcagcgacctcgccgtcagcgatcagcaaacccgccaactggccgacgcggctgtacaaatggaaggccaggccgaaaccatcagcgagcgtctggcggaagtcgggctggatgactaccaccagcgcatctatgacctggctcgcgaaggcgccagccgcattgccgcgcaattcgaggccgatgtgcagcagaaccgcatcagcctggatgacctgttcgaccgcagctacacgccgattgccaacaccagtccgagcaaataccacacccgcttcgacggttacaccgaccaggtgttgccggcgatccaggaggcgctgttgccgcgtcacgaagggttggtgttcgccattgcctgcacgccccagggctatgtgccgacgcacaacaaggcgttttcccaggcgctgaccggtgatgcgcaggtggacgctgtgcagaaccgcaccaagcgcaagttcgatgaccgtaccgggattcgctgcggcagccatcagcaggcggtgttgttgcaaacctatacccgcgacaccggtgagctgatgcacgatctgtcggtgccgatcatggtcaagggccggcattggggcggtttgcgcctgggttacaagcccgaggccgcgaaaggcgggcgttaggattattgcggtttatgcaagggagctattccggggatagctttttccaacagcaggaaaaccgtagcatggcgaacattgttagccagctaactaatgctgcggagaagttccatgcaaaacaaagtcgatgtcgccgtgatgattggcagtggtgtaccgcaagccttgcgggcattgggtcaaaaggcctgttgggtggtattgctcaatggagagcagcgcggtacggcgttcgccagtcgcgatgaggcggaggagtgcagggctgcctggcaggcgctgttgcggctggagcagtcagacagcctgcattgacggctgcttagtgcggttgatgcaggcgttggttcagctcatccaccgcaatcgcccattcggcgtcgtcacgcagttcttccttgagaaagctggcctgttgtgcggaccagaacggcgcatcgatcagtttcacatcttcgggcagcggatgggcgacgataaatgcgtcgatggcctccggggttgaatccaggcctaattgttcaaacagggtttcaagggtggggattggcgcgtccatttcgttctccatgcagggtggtcgttatgcatgggagggttgtagcgcagcggagttctatcgaatgttcaggaattcagggccccggcatccacagcagtctttaacgccttggcggcctcttttgcagcgacggcggctgcatcgacagttttgaaccagcggtctttttccacttggtgcgtggtcacagtggtcagcggtggcttggcccgcatcacgatcactgcttgaaactcaccatctacttcccttgcgtcgccatggatgaaaaattcgccgatatcaaattccgtcacgtagagccttcccttggagataactgcactggagaaacctggcccgtggggcgcaaacttcagtggacgggccagtatggcagttgttgcgggtcggcggcgcagtaaagttaccgggcggacgaaacgattgctccgtggggggcgtgcaacatggcttccagttttctggccagttcacaggccttgacatggtcgctgcgaaagcctttgatgcggccgctgagcacttcgcgcacgtggaagaagttccggccggcaggtacgacttggtaaagaaccgaatccgggtacccctcgaagctgttcaagcggtagtattgagcctcgtcctgacaggatgaacgggtttgcgaagacatagcgctgtagggtgatcgttgcatggcctgctccttttcgatctggcgggatgactggattgcagcgttttgactggttttgatcggtgctgctgttttagtattgtcgtcagcagtcagcgtccggttccatgacagcgtattcatttgtgtatgcatgtcggaaaactgcatttttaatcgggttattctctgaagttggtcgacccgtattctcgggccgttgaacctgtgatctcctgtggcgcctgatgaccttgcacaaggcccatcgagcatgtctgtactagtctttcggctcgacagcaggattttcttcagttttttcaaagaatgagttgtgtgatcgtgccgtgatggccgtttttttgtgctgcccgctctggcggacagcgctctttccatgtgggggcgtttccttggcagtcagtaatctggatatgcacgcgttattcgtgctgggtgatttgcgcgcaaagttggtcaaacagttccaatcccgttttgtttatattaccgagcagacgccggaaggcatctacattgccgaaatcgataccgaggcggcgatggtggtggatgacaaaccgcgccttgagctcaaggtcggcgaccatttccgggcggcggtattgcccagtcgtgagggcggcaagttcgaattgaagttccgcgatatcaagttgacggtctatggcctgggcgactacgcctttgtgtcctcggccgaaggccagggcatcgtgttcaaggaaggccacagcgtgatgctggtgttcgccgccaacgagcaactgcaggaaggcctgaccaaaaccctgaaggccgtgaccggcaaggccgccaaatggcgcaaaggcgaactggtcaccttcaaggccagtgaataatcagcaaaaaccgcgaacacccgttatctcccggaacctctactacagttgagttgacttaactattcagaggcttcgcgcatacgtagcaaagccgtccgccattggctgcgatatcgcgaggtgcgaaggcatgaaaggattgagaacgctgttggctgcgtcgctgacgagcctggggctgtctatggccacgttgccagtgaacgccgccgaggcgccgatacattttgccgacctgaactgggaaagcggcagcctgatcaccgaagtgctgcgggtgattgtcgagaagggctacgacctgcccaccgataccttgcccggcaccaccatcaccctggaaaccgccctggcaaagaacgacatccaggtgatcggtgaagagtgggccggccgcagcccggtgtgggtcaaggccgaggccgaaggcaaagtggtgggcctgggtgacacggtcaaaggcgcgaccgaaggctggtgggtgccggaatacgtggtcaagggtgaccccgccaaaggtatcaagcccctggcgccggacctcaagagtgtgaaggacctggcgcgctacaaggacgtgttcaaggacccggaatcccccggcaaggggcgctttctcaacagccccatcggctggacctcggaagtggtcaacaaacagaagctcaaggcctacggcctggatgacagctacgtgaatttccgcagtggttcgggcgcggcactggatgccgagatcgcctcgtcgatccgccgcggcaagccggtgctgttctattactggtcgccgacgccgctgatggggcgttacaagttgatccagctggaagagccgccgtttgatgccgaggcatggaagaccctgaccgatgcggataaccctgatccgaagccgacccggtcgttggcgtcgaagttgagtatcggggtatcgacgccgttccagaaagatcatccgcagattgcgcagttcttcgagaaagtcgagtttccgattgagccgttgaacaaggcgctggcgactatgagcgaaaaccacacggcaccacgggaggtggcccaggcgtttcttaaggagcatcccgaagtgtggaaggcttggttgactgaggatgtggcgcagaaggttgaggcgagcctgaaataaccacggatctttcagttcaatgcaaatcaagggtgggagggagcttgctcccgattgcagcgtatcagtcacggcatggtcgactgattcaccgctatcgggagcaagccccctcccacatttagttgcattccaggatcagaaccgggtctgtaccgccaactcaaaggttcgtggtgagcccaagtaatacgccggcgacacatgggcaaactcggcatacacctcattcgtcaagttgcgcacacggcccgtcaccgaggtgtgtgagtccaccttatagcgcaggaacgttccgaacagcgtgtaggccggcactgtctgggtgttggcgttgtccgcatacacctcggctacatatcgggcgtccacgcccccttgccaatcctcggcaaaatcataggtcagccacagattccccacgcgcttgggtacgttggttggcgtgttgcccttgcgcgacaccactgcgccactggcgattttctcgttgaagtcatcgtattcggcgtccacccaggcgaaattgccttccgccagcaactttggcgtgatgcgcagcgagctggccaattcgatccccttggatgactgtgcgccgaccggaatgctgttggtgggatcctgcgggtcggtgacggcaaagtccttgcgctcgatcttatacgcggcaacggtggccgaaccacggccgtccaggtaatcgaatttgctgcccacttcccactgcttgcccgtcgagacatcaaacacttgcgtggtggtatttggctgctcggcggctgtgctgtattgcacatacacattggccgtcgggatgaactggtaggtcaggcccacgcgtccggtcaccggctcccagctgcgtttgaagtggcgggggttggtggcggttattgcgcgatgattggtgacgtccaggtcgatggcgtcataacgcaggccggtcaacagcgacaatttgtcggtaagacccaggcgattctccacgaacaatgccttggtggtgacagcgttggtcttgtccttgccgaagctttcccgggtccgcgggaggtcaaagaagtgtccggggtcaaagttgttggggtctaccgtgctgttgccgggtacgttccacggtgtattggtggtgctgttgaccttgtactcgaagccgccggaccaggtagttgacaggccgaagaggctatcgtcgtggcgcagctcgaactggttgccgttctgttcaccttgatggcgcacctgataggccgtcgaacggtttaccgccgtgttgttcgcgttgtactgataggtttcaaggttgcggtaatcgcgttggctgtccaagtggtaaagggtgtttttcagggtggtgctgtcgttgaggcggtagtcgatgatcgaacgcgcccagagggtgcgctgttcgtagcgcccgtcggcgacgttgtagttgttgaaacggttgtgtttgtcgatcttcaactcgcccgccttggggttgagcaccggcgtgccccagtaggggctgtcttcatgctcatcctgatattccagcgccagggtgtgggacaggttgggcgtgaggtcgctgagcaaggaaaacgccaggctccaggcgtcgcgctgatcgcggtcgatgtagctgtggttggtgttgcggctcacatccaggcgggcgtaatgctgcacctcggcgccaggttcggtcagggcatggttgacgccgaaggccatgccggcggtgtcgtagctgccgtaggtgagctggccttcggcggcttgttcctcgcgggtggccagcttggtcacgtagttgagcgagccgcccacggagcctgcgccgttgatcagcgaggaggggccacccaccagctccacccggtcatagatccatgcatccacggggcgggccagaccagtggcgacattgatgccgttgaacatctgggtgatctggctgctggtaaaaccgcgataggagacaaacccgccaaaccccggcggggcgctggcgttgacgccgggcaaggtgttggcggcatcgcgaaaggttttggcgccatggcgctcgatgtcattgcgattggcgatggccaccgacgccggggtttcccgcacactcaagcccaaccgcgacgctacgccgctggattgatccagggccaggccgggttcggcggcttgttcgccatcgatggtggtcggggccaactcaagggcccaggcgcagacaggcaggcagccgaacaggcctgccaacaggggtagatgtttcatggttgaatcctgaaaagcttgcttgaaaacaacgcacaggcgcccgtacttccttgcggaaacggtgctcagtgcagatcggaaagcgaaggcatcaggtgaaggcaggcggcgcgcgcggattagccgcaggccaggtgaagcgggcagggatgtcggcagccaggacaatggcaggcggtggtgcttggggctgtggcaacaccgccacattcaggctggaactcagcgccgggcccatgccgccggtggaacacagcgggcaaccaaacgccttggacagcgtcggtaaattctcttcagtggaattcgacggcttgggcgcctgggtacgcgggtccaccgtacagaactggccgccgatgccattgagctgcatcccgaccatctgcccatgcccgatactgcaggcgaacacattgaacaggacgcagcagtagagcatccaggcaatgagcgagcggtcggcacgggcaagtttcatggggcggcactttaccatcagccgccgacgaaatgcctgcaaaaaatctcagggcgactatcctgtttcgcaccttttcagggagagccagccatgagctttgttgtcgcacgatggattgtcggggtttttacctgcatcagcatggtccacctgtactgggccgccggcggcaaactcggcttccaggccgccattccccaactgcccggcgaattcgccaacgggcccagacctgcattcaaaccctcggcattgggcacgttcctggtggcgatggggttggtggccattgcgctgttggtgtgcctgcgcgccgggctctacttctcggcggtgtcccacggggcgttgcagtggggcatcagcgcgattgccgtactgatgtttgcccgggcaattggggattcggagctggtggggttcttcaagaaggtcggtgggtcgaggtttgcgcggtgggatacgtatttttattcgccgttgtgtctggtgttgggggtggggttgttggtggtggcgtgggggtgaaaggggactaatgcagggtttgtaaaattctagaagaagaaaaacaggcctgttctgtttttgatcgcaagggtgtttaaagcaattattttgctcatagtagatgagttttcgtgcgtcaaatggttgttgaggatctctaaggttttggtgagctcctcaacgttgtaaatggcttcgtcttcgtaatcgtcgatgatttttccaagcgtggtgtttatcgcttcaagcacgccggactcaataagttgtccgtactcttcgcgggtaaggataacgctttcgagtaaagattctgggcattcgtctacgtctaataaactcatggcctctaaggtgagtggggtgcagattactttcattttttgtgtgcctttttattaaagtgtgtcgcttcattgtattcgctttgcgttctaccgatttgctttcctgagggagatatcctgttgttaggaaccacgccctcaaggctcaagtagcgccttttacccggctgtgatgggtcatggattctgaagtagtccccgttgaggtcttctacaatttcaatcccattttcagggttcttgtagatcttcttgcctttgtctgtcgtcgtcacgattgggtgagtgccggtaaacttgacaatgttttcatctaagcttgctacctcccactttgaggagtacttggctgcgcgctcagctcccccagttttaggaagttcagcttcccctgggtgcacttgtgctgacttaaccggatccttagcacttacctcttccctgcacccgttatctccagggcagttattcaaccccaacggatcaatccatcccgttgggtttggcacgtacaggtacacgttgatcccacccgccaacttcaccgggtccggcgtcaggtagcgaccaacatccggattgtagtagcgatggcggttgtagtgcagcccactttccggatcgaagtattggccctggaaacgcagtgggttgtcgacttttcctatatcgaggcgggttatttcgccgtaggcgcggtaatgcgcggaccagacgatttcgccgtcttgggcagtgagttcctgcggggtgccgaggtggtcaagttggtagtggtaggccttggtttcctttggaccgaaaccttccaacagcgccagcgggcgaaagctgtccggttcgtagaggtagctgcggtgccgatccgcgtggtgttcggcgatgagtttgtcgccttgccagaagaattcggtcgtaatcccatctacggttttactgatacgccgcccaaacgggtcgtagcggtagctggcgatctggccgtcaggtcgggtaatgccgatcagacgatgctggcagtcgtagcggtattcggtgacgagtgcgtggcccttgccactccgttcgcgaatcaggttgccgaaggcgtcatagtcgtagtggtggtcgccctggatcatcaggcggttgccggcgacgatgtcggggccggggcggttgtgcatcagcaggttgctggcggggtcgtggccgaagcgttcttgctcgccttgggtgtggtcggcgcgggtgaggcggttgagtgggtcgtagtggtagcggtgttcgcccttgcgggtgtcgagcaggcgggtgaggtttccggatttgtcgtagtcgtagtggcggcggtatagcgggccttcggcatcaacgatgctctggttgaacaggcggccctggtggtcatgttggtagtggctgaacagttggccttgttggcgttgctgttcgcgaccggccttgaacaggtgtgaggtgagtaccgcgccgttcagttcgacggtggcgaggtggccgcctttgtcgtgattgaaggtgaggcggttgttgtccggcaggcgcaggttttgcagctggccgcaggcgtcgtaggcgtagcgcagggtgccccagccttggtgttcggcggtgaggcggttttggctgtcgtactcgtaggccagggcccagtggccgtcttcgacacttaggagattgccctggcggtcgtaggcgtaatcgacggtattgccatcgggtagggtttttctgatgaggcgtccggcatggtcgcgctcgtagcgggtaaccagctgactgccgtcatcgccgtgttcggtcttttcccgaaggttgccgttgaggtcgtacacgtacgccgtgcgctgaccgtcaaacccggtttcctgctggatcaggccgttgctgtggtactggagccggtaggtctcgccaacctcgttttcgatctcggtcagcaacaagcgcgcattgtcgtatcggtagttgacctgggtgccatcggcattgatgcgacgactgatcaggtgcaggccgtcggcgtattcgtagcgggtgatgtgcccgagttcatcgcgctcggcggtgatttttccgtaggggttgtagctgtattccttgaacccgtcgcctggcagcacaacgcgaatcaaccgacctacgttgtcccactgatactgggtcagcgcgccgtgttcatcttcccgtgcaatctgtcgccccagatcgtcatagcgataacgcttgatcccaccattgggcaactgctcctcaagcaactgcccacgctcattccacaccagccgctgacagctgtggtccgggtaccaaaccccaaccagttgcccatatttgttgtagctgtagtcagtcacatgaccgtcaggatcgatcttgcgcgttacatcgccctgaccgttgcgctcatacttccaaaccgcctgaccccgccttacaacgcgtacgaagccgttgtcatgctcgtaggtcgtcggctcatcgtcccccggaaacaccgccaccaagcgcccggcttcgtcgtactgatacgccgtgatcgccccgagcgggtcctgctcaaccgtcagccggcctctgtcatcgtaggatttgaagtgctcggcgccatccggatccactcgctgcaccagccgcgcccgctggtcatgcacgtagacttcctggctgccatcggcgttaaacaccgtgacctggccgttgtcatcccaggcataacgcgtgtccatctgcgagaaactggcccaatgccgaatgcaccgcgccgccttgccagcccgttcccattcccagaagaaactcgccccaccggccaagccgcgctcaagaatgacgtgctgttcgtcgtagcgataaacctcgctttcaccgacggcattggtcgctgaaaccagtcgtcccaagtcgtcatatgcgtaggaaacaaccgtctgctccgtcacccacacaaacggaccgtcatccacaacgcgatgaatctggtaatccaccgccacaatccggcccgacacatagcgcaaacacaacgaacgcccgacaccgttatccacccgctcaatgcgccccagaaaatcccgagaaatacgcagccggttgtcatacgcatcgctgatcgctgtcagcacaccgtcgcggaagtggtagaaacgtgacgcctgcgccagcaccagttcatcgggcgcagcacccaaatagatcgccgcttcggccaggctattggtgatcgcaggtcgagaggcagtaggcaagggcagggtggtcgaccgattctcatgatcggtccaaaccaccgaatcaccctcaaccaccagccgatgcgccagcgagtgactccagccaaaccccagcccgcaatccatttccaccgcactggtgcggtacaagcgagtccactcaaccggcaagaccccgtccagcgtgccatcggtaagggtcagcaactcctcgccggtgaccatcgacaccgggcagccgttggtggcggtcttgtccgaagatgccgccgcatccccattgggattgcgagcagaagccggcacatcatccacatgctcttgctgcttcagcaccgcgttctgccgcgccttccagcgcatctgcatcgtgccttgcttgagcccgccgaccaccccgcgaaccgccaccgccttgtagcgatccaccgcctgcatgaacttggtcagaatcgccaacaggcccttaacaaaacccaccgccgcctcaacaatccgcgctccatacttgaccaaccgcaagctcaaatacgccacacccgccgccggcaaggcgatggtcaatacggcgccaatcaccaggtcaatcagcagcgacaccacaaaccctgctgctacctcggccatctcaccgggcggtaatgcgtccagccagagcatcgccgtacgtaccatcaggtacagcgctgcctcgtcactggcgagcaacatcgcctgttccatgaccttcggcgtgtcggtggcgatttgcgccaacctggcggcctgctcacccaactgctcaacgaacgccaacgggtcttcaagaattgcctgcaccagcttgatgctgtcccacacgtcgcgaatcgccgcccaactgcccgccaataaaccgctgccaattgcactggcggtcgagcgctcccaatgcggtttaaagccagaccactgctcccgaagccactgctccaaatccctggtcaacccggcgtaagaggcaaataacgcgtcaacctgttcctcggacacgccaccctgcacccgcacctgatagcgcccgcccgccgcacagtggtgcgagcccttgccctgttcatccagcatgaccaccgtggaactgccgtcatccaggccgatgacctccactgggatattgccgattggcacgtcatacaccgactcgaacttgctctcgatcttcaactcaccgcccatcgcgcagcgggtcacgctcgaaaagtcagcgtcggaaacgcttaccgaacgctgcgaatcccccacccgcaacacccgatccatccccagcaacgacggcaagtctgccgcatgactcagcgaatccagcgcacgcgaataccaggcgttcatctgctggcgataactcaccaggctctgatgaaagccgtccagttccatttcgatcagggcaatgtgggaagcgttggtcatccgtgacgtctcggcaaagggcaagacgtcggagcatgccccagcaaaaagcggctggatgaacggttggaaaattcagaaagagcccactgcgctgggggaaaaaccgcgaaaaatcagctcgaagtgctacaccgaaaagcgataaacctgattgcagaattgcccgccaaataaaaatcgctcgcatccttgcccgattccccgacatggccgtcatggttaatagaacctcccttacgcaggatttcccatgtcgcgccttgctcgtcccttgcacccactggccctgtcagtggcgatggcttttgccgccgtgccgttgctgaccgtccagtcctcctatgccgaagagagcagcagcgcgttgcgccgtttctcgatccctgccggtgacctgagtcaggcgctcaacaacctcgccgaacaggcgggcctggtgctggccttcgatgcaggcctgacccgaggcaaacgcagcaaggggttgagcgggcaatacgacaccgacgtggcactgaaccaattgctcgccggcagtggcttgcaagccttgaagatctccgccgaccgctaccgccttgaaaccatcccggataacggcggcgccatggagctgcaggccaccaccatcagtggcgcgtaccatagcgaaagcccgaccgggccggtggccggttatgtggccacgcgcagtttgtcggggaccaagaccgacactgcgctgatcgaaaccccgcagtcgatttccatcgtcaccaaagaccagatgcgcgcgcaaaacgccgagagcctcaaccagatcctgcgctacagcgccgccgtcatcccggaaacccgtggcgccactgcgtcgcgccttgaccaactgactatccgcggtttctccccggccacttacctcgatggcctgcgcatgccgtcgagccgtgacgccctgccgcagaaagacgcctttgacctggagcgcgtggaagtgctgcgcggcccggcgtcggtgctgtacggccagggcacgccgagcggggtgatcaacatggtcagcaagcgcccgttggatacgccgtttcatgaagtcggcgtggaatacggcaccttcaacaagaagcgcaccaccttcgacttgagcggcccgctggatgatcagggcgtgtattcctaccgcgtggccgggcttttcgacgatgccgatgggcaggtggagcacaccgagacgcgtcgtcagtcattgtccagcgcctttacctggcgcccggacgacgccacttcgctgaccctgctcgggcatttccagaaggaccccaagggggcgtcctatggctcggtgccggcctggggctcggtactgcacagcccgacagggcgcagcatcgatgtggatttctacgatggcgaaaagaatttcgagaaaagcgaccgcgagtactactccatcggctgggcgttcgagcatcacttcgatgacgtatggaccgtgcgccagaatgcacgttacctgcgcagcgaaggccagtaccgcagcctctacagcaactacctgatggcggattaccgcaccatccgccgctcgaccatcgccagcgatgtcgacctggatgcctacaccctcgacaaccagctgcaggccaaattcgacaccggcccgttgcagcacactttgttgatggggctcgactaccagaacaccagcaccgacaccaagtccggttccggcgtgtacactgcaggcccgaccctggatattttcaacccggtctatggcgcggctgtcccggtgccggcctacaccaccgacggcacttcgcgcagcgaacagaccggggtgtacctgcaagagcagatgaagtgggataagtgggtgctgttgctgggcggtcgctatgactgggccagcaccgataacagtacccagaccatcagcacgggggccaagagcaagtcgtccctggacagcaaggcgtttaccggtcgtatcggcctggtctacctctttgacaatggcctggcgccgtatgcgagttatgcggagtcgttcaacccgcaatcgggcaccggctacggcggttcggtgttcaagccgaccgaaggcaagcagtacgaaatcggcatcaagtaccagccgccgggcagcaacagctttatcaccgcggccatcttcgacctgcgccagaccaacgtgctcaccaccgacccggaccccacccacctgtgcggcaccgggcgctgccagagccaggacggcgaagtgcaatcccgtggcttcgagctggaaggcaaggccagcctcaacgataacctcgacatcacagcggcctacgcgtacctggacaaccgcatcagcaaatccaacaacactgtgcgctatgcgcccatcagcgatatcggcgtaggcccggccatcgccgccgaaggcaccaccacctacggcgtgccgcgccacaccgcctcggcgtgggctgactacaccttccacgacggccacctcaagggcttcggcgcgggtgcgggcgcgcgttatgtcgggtcttcctggggcgatacagccaacaccctcaaggtgccgggctacaccttgttcgatgcggcggtgcactacgacatccccaacattaccagcctgaaggacaacctgcgcctggcgctcaacgccaccaacctggcgaataaagagtatgtcgcgtcctgctactcctattcgtggtgctggtatggctcgcagcgcacggtgcaggcgagtgcaacctatcagtggtgataaggcaatttaatggcccccttgtaaccaaatcctcgccagaatcgcttttattttcaggtggttaggcgaggatgcaaatgcgcactgttggaatcatgctgatcgcctgctccctggccggcggcgcggctgccgtgcaggcacgggagttgcgcgaaggtgacaagtacatgtgcagttggggcgccggcacggccgccagggctcaggagttgaaactgtcgggggtgtcgctgtatgcggcgcgacagaagatccagagcatgaagttcaacaaatcctggatgcgcatgatggccatgggcatcaccgaacagacctacgacagccgttcgcggctcaagcccgaggccattcgccagggtttctatcaggattgcgtgcgctacaaggtcgcacgcaaatgatcgagcaagcaccggccagtacaaaatctgcgtaagcctgtccaacttttcctcggcggccctggccatactggcgccaggtaaacccgaggcacaggccatgactgactacgtattcacccccgcgccaaccccaaccctcgcagtccaaggcagtgatgcgcgcttcccgctgcgccgtgtgttctgcgtgggccgcaactacagtgagcatgcgcgtgagatgggtcacgacccggaccgcgagccgccctttttctttatgaaaccggcggacgccgtggtacccgccgaaggggtgatcgcctacccaccgctgaccgccgacctgcaccacgaagtggaactggtggtggccatcggcaaggacggagtggatatcgccccggaacaggcgttttcccacatctgggggtatggcgtcggcgtcgacctgacccgccgcgacctgcaagcccaggcgaaaaaactctcgcggccgtgggagtgggccaaggcgtttgatgcgtctgcgccgagcaccgcattgcgctcggtgagcgcggtagggcatccgtccagcggaaaaatctggcttgacgtcaatggcgaacagcgccaggtgggcgacctggccgaccagatctggtctgtcagcgaagtgatcagccatgcctcaaggtctgtcgcgctgaaggttggcgacctgatcttcacgggcaccccggcaggtgtcggtgccttgcagccgggcgatgtggtcacggcgggcatcgagggcatcggcgagttgcagttcaccctcggccaggcttgaggctaaagtggtgacccggccacccgagagaccgttatgccaggcacccgcgtcaccacctacggcatggaacaacgcagcgaccgccccgacttctacatccgtgacaagcgcgggcgggcgccgctgacccgcccgcatcggcatgaatacttccagatccagatcaaccttggcggcgacaccgtgcagcacatcggcggcgcggtgcggccgtttccgcgcaaggccctggcctttatcctgccccatcgcctgcatgtgattccccatcccgaagacggcgagttcatgctgatcaacttcagccagggctttttcctgccgcaactgacctgcgcccccctggacctcgaagacattcccatcggccaggcgcccgagctgtcgccgtttcgcttccaggaacacctggatttcatcctcgatgacgcagcatttgagcaggtgcaaagctggctcactcacatgcgcgaactggatgcccaccgcaccttcggcacccgcgaacgtctcaagggttacctgtttcaaatgatcggcctggtctgcgaacaatatgccgagccgttgcaggcgttcgccgccgataatgccacccggcgcgggcgcaaggatgcgttggcgcgggtgcagcgctacatccgcgagcatctgcacgagccgaccctcaaccttaccgacacggcagcggcggcgttcctgtcacccaactacctcacgcacctgttacgcaaggagaccggcaaacccttctcgcaactggtgctcgaccgccgcttgctattgacgcgcaccttgttgctcaacagtgcgcagatgatcggccccattgcacaccgctgcgggtttaccgatgaagcgtacttttcccgttgcttccgcaaggcccatggcctggcgccagggcaatttcgtcggcagcagcatggcgagtccttttaggcggcggtttacaaatccacgacaatcgctatgtttctatttgcatacaattgcgtccttcattgggaggccagtatgcaaacgcttatccgcgcagcgacgcaggacgatgtcgacacgctcttcacccttcgcacctcggtggtgcaaaaccatctgagtgtcgagcagatggccgagttgggcatcaccccagaggtgctggccgacagcatccgcgaagccccctgcgtatggatcgccgaagtggatggccggcccgtggccttcagcatggtcgacctggcgaccggcgaggtgttcgcgatgttcgtattgccgtcccacgagaacctggggctggggcgtcgactcatggcggtggctgaagccgcgctgtttgcacaccatgacaggttgtttctgatcaccgatgggcgcgacgaaatccgcgccaacgggttttaccaacgcctgggctggaccctgacggcgcaggtcgaggacggcgacgtgcgttatgagaagagcagggcgcagtgagccatgagtccacccgagccgccgtccaacaactttcgctacttcgtgttcgcagtgcttggcgcggcggtgttgctgggggtctattttgtgcagctcaatgcccaggtcgaccgcgagcgggatgcgaccaatgagcgcttggcgctgtgtcgacaggtggaaagtgtggcgcgctcggtgttgcccaatagcctcgatacacaagatgcctgcgaacagttgagcgagcgtatatcgaaaagtgtgacgtcgccttaactcattaacccttttttatcagtggaaatagtgccagtagttgcaccaaaaagtggcatttatagggttggctaccttaaaaaacgtgtggttattgaatgacttacagcgcttttaatccgacgaaaggattaaaataatcttgttacagctttttacaatcgttactatagccgggcgtttacctcccacggtttatgcatttttaaatcccaagtttccatcagctacttgggattttttttgcttggaatttgaccttcgcgtcaaacttcaccgtcggcgaactccgcgcgcatccggccattacgcttggcctggtacagcaacttgtcgacctcttcgacgaaccccagcatcggcgcatcaggtttcacgatacgtgtacccacgcccaggctcagggtcagcaggctcgataccgccgaataaccatgctcgatctgttgctggcggatcaggtgcagacagcgttgcgccacctgcctggccgattgcgcatcggtttccggcagcaaccacacgaactcctcgccaccgatacgtgcaatgaaatcccgtggccgattggctgcctgggacaaggtgtgcgccacctggcgcaggcactcatcgcccttgatatggccgtagtggtcgttgtactgcttgaagaaatcgatatccagaatgatcaacgacagcggcaactggctgcgctgggcgctggcccattcccgttccagcacggtgtcgaacatgcggcgattggcgataccggtcagaccatcttggtaggaatattcctcaagttgtttctgcaagcgcaccaggtgctcttcggtcttcttgcgctcgctgatatcgaacatgaaaccgatcagcgcctcgacctcgccgtccttacgcaccacgtgcaccacatcgcggatccacacgtagtcgccattcacgctcagcgcccggtagtctgcctcgtgatccacaccggcgcgggactgcgatacgcagaaattcaccacgtattcacggtcgtccgggtgcatgcgctcgacccagtcgtccacactgacccagctttgcggggtccagccgagcaacgtctcgatctgcgggccgatgtaactgaaggtcatgctctgccaatcaatgcgccaggggatggccttggtcgactccagcaaggttttgtacacatcgctgtcgggctggctcggagggtcgatgctcatggggcggctgctctggatgatggcgaaaagccaagagcgtctttcgatcggggcgcttagtcaagccttcggcggcgcagcagacgagaggtcgccaaacgggtttctggcgccagcgggccggcgtttccacaccgaaatgaggcatggctaacacttttgcacgaaccgctccatgccccgcagaacctcgtctactctggttccatcacaacaaccgggtgaggcccaggggtggggacttgtcatgatttcaatcattgaattcaaccgcatcatggcttcgggtttcctgccgctggcgtgcgattgcaccttgaacagcgacggctcgttgcgaatcactgtcttcgaaccggtgtccggccgggtcgacctgctgctgaccggggtatcccccgacggtttggacagcatccgttccatctcaaacctgattggtgagttgcgtaccgagatcaaggccgggcgtcgcgggtttgctgcggtgggttagccgttgacggtgtgggtgggagtatccagcgcgccgtaatagcgccagcagcaatggcgatgttccggcacgatcacgcagccgctgaggctgacgatcagcagtgcggcaaccagcatgtaaagtcggcggtacatggtgtttcctcttgggttgatcagcgttaatccttcaacgcagtcaccgacataaatccgtcgcgaagctttcaaacatttcatcaagccctgccaccccctgcgcaatactgctgaaaaacctgcgacggattttcctgcccccgccgttcaacccatcagcacccgcactttcgcgtgttgcatgaaggagttgccatgagatacctggccaaattgcgctatgccttgcttgctccgctggcccttgctgcgtttgtcagcacccccgtgtttgcccagaccgaaatcattatccgccagccaccgccgccggaacgtgtggaagtgatccctgtggaacgcccgggttacgcctgggaccgcggccactggcgctgggaagggcgcggctacgcttgggtgcccggtcactggcagccggtgatgcgcaatgcgcgctgggaaccgggccattgggaggctcacggccctaattggtactggcgcgaagggcattggatccgctgaccgagaattgcccgattgaaagacactgatccggacgtggaactgctggcgcgcatcggtaacaacgagcctgcggctgtcaacgaaatggtgacgcgcaaactgccgcgtctgctggcgctcgccggccggatcctgggggatgccgacgaggccaaggacgtggcccaggaaagcttcctgcgcatctggcgccatgcggccagttggcgcagtggcgaggcgcgcttcgacacctggctgcaccgggtggcgctcaacctgtgccacgaccgtctgcgccggcgcaaggagcgcccgttggaggacgaggaagcgttggcgctgacagacagcgcactgacgccggatgaacagctggaagccgccgaccgcagcgcccggatggctgccgccctggcggcgctgcccgagcgtcagcgcgaagcgattgtgttgcagtactaccaggagctgtcgaacatcgacgccgcggccctgatgaacatcagcgtcgaggcactggagagcctgctgtcgcgggcccgacgccagttgcgcagccaacttgccgacacacccgggcttgcccgcccaggaaggggaaaaccatgacacccgaacgctttgcttacctggccgacgcctatggcgccgacctgcaccgctggccccgcgccgaacagcccgcagcccaggctttgctggacagcggcaatgtgcttgcgcatgaggcccagcaacaggcgcgctggctcgacggtcaactggacagccatcaactggcctacgtcgatccttcgctggcacggcagattcggctgtcggccccgcgcggccagtcattctggtcgcgctatgcccgctggttgtcgccggccggcctggtaggcgtgggtgtcgcgggcatcgtcaccgggatgctcgtggcctccctgagcgtgccgctgccgatgtggtcgtccgaggtgttgcccagcgtcttcgatcaaggcgatgcgcaagtcatctttaccgtcaatgccgaggacaccgagcaatgagcctgaagtccctcaaaccctggctgctggcctcggtcttgctcaacgtgttcctgatcggcggcgtcggcggtggcctctaccactggatggccagtgccaagcccgctgaggcggtggtcaaccagcacggcttgcgccaggcgatgatcaagctgccgccggagcgccgccgggaattgcgccaactgctgcggcacaaccgggccgacagccagccgctgatcatggccgggcgtgaagcgcgcatgggcgtgatcaagcaattggaagcgccgaccctggatcgggatgtgctggtggcggaactggccaaggcccgtgaagccgatatggcgctgcgtgcgttggtggacacgacgttggcgcagttcgccagcaccctgcctcgggaggagcggcagaagttagtggaggcgttgtatctgcgggggcaggcggcaggccgcaagccttagtcctgaacgtggcgcttgtaggtctgcgcccggagcgctgaactacaggcgacgcagaaaggatttgacgatgtggcgggtggcatcggtggtgtccaactcgtccatggcgccataggggtgccactggcaatcgacgatttcattgcaaggtttcgcatcggcgacgttcaccaccgacgcttcgaacacgtggtgcacggtgtcgcgggccttgagttcctgcaaatacagcaagccgtccacgttcaatccggtttcttcttccagctcgcgctcggccgcgccgaccgggcgctcgttgcgttcgaccttgcctcccggcaatgcccatttggatctggccttgcgcacgaagaggatatgcccctcgtgttcgcaaatgaccgttgcacgtattttcatcgtctgtgccccgcagcgggatgagtgtcataaaagtgtaatgcaattgtcatgctgagtgcttatggcgctgacgtgtggggatgtggatactgcccgattgatcaaaacgcacgaggagggcagatgagcaccgtacgctggggcatgatcggctgtggcagtgtcactgaattgaagagtggaccggctttctacaaagcgccaggttctgcgctggtggccgtgatggggcgccgcgaagcggcggtgcgtgattatgcggcacgccatggcattgcgcgtttctacaccgacgcccaggcgctgatcaacgaccccgaggtggacgcggtgtacatcgccacgccgccggacagccatctcgaatatagcctgatggtcgcggcggccggcaagcattgctgcgtcgagaagcccatgtcgctcaacgccgagcagagcgcgttgatgcagcgcaccttcgagcgtgccgggctgcatctgtttgtgtcctattaccgccgttcgctgccgcgtttccagcaagtgcgtgactggctgcgggaaggacgcatcggcgaactgcgccacctcacctggaccctgtgcaagccaccgggcgccaatgatgccagcgccgccaactggcgcaccgacccggccatcgctggcggtggttactttgccgacctggccagccatggttttgacctgttccagtacctcgccggggacatcgtcgaggtctcgggctttaccgcgcgacaagccggggggtatgcggccgaggatgcggtgacggcgtgctggacgttcagttcgggcgcactgggcatgggctgctggaattttgtcgcggaccgtcgcgaggaccgggtggaactgatcggcagccgtgggcgcatccgattctcggtctttgaagaccagccgctgcaccttgagggtgaaaccagcgaggtgctggaagtgccgtgccacacgcatatccagtggcaccacgtgctggcgatgaatgcgcatatccgtggcgaagccgagcacccatcgctgggtatcgacgcgttgaagaccgatcgaatcctggacaaggtgctacaacgtaacccccatcgtcccgggtaggcggcatagggtggtcttttttccaaggaacagacagatgaaatactggatggcggtatggctggtactggcgacaagtgcgatggcggcgccgcgcagccaaggcacaccgggggagtttgatttttatgtgctgtcgttgtcgtggtcgccgaccttttgcctgacgcacccggacaacgagcaatgttccggcaagggctacggttttgtcttgcatggcctgtggccgcagtacgcgcgtggcggctggcctgcatcctgtgcgccgcagtcgccgttgagtcgcgaagaaatcgagaagggcgcaacactgttcccaacccgctcattgcttaagcacgaatggtccaagcatggcacctgcagtggcctggaacccttggcctacctggaaaaaaccgaccaggcgctgggggtggtgagcattccgcagcaactgcagccgttcaatacgccgccgtcgctgcaggccagtgagatcgaggcgttgttccgtgaaagcaacccgcgcatgggcaatcatgggctggcagtcatctgcaaaggcaaagtgctgtccgaggtgcgggtatgcctgaccaaggacctggccttcgccggttgcccgcgcagtgtgaaaacccaatgccgcgatggcgacatccggattcccgcgcagcggtgataagccgctggcgggcatcgggttgatcagttgttgaggtagaccgggctgtcggtggacaacgaggccttcacggccagggtcatgtcggtgatcaacacttcttcgcggtcttcgctcagggccttgagggtgatggcgaccacgtcctggggcgtgctcttcggcgcctgcacgtcggccaccatatcggtgtcgatgtaggcggggtgcacgccgatcaccagggtcttctgttcgcgcagttcgccgcgcagtccattggtcaggccccactgggcggacttggaggcgctgtagccgccagtgccgggcgggctgagccagctcaataccgacagcacattgatcagcgcgccgccgccttgcctggccaggatcggcgcaaacgcacggctgacgcgcagggtgccgaaggtgttcacgtcaaagtgctgttgcaggttttcgacgctgtcttcagccagcagcgagccgtatttcaggaaccccgcgttgttgatcaccacgtctacatcggtgcactgctcggcggcgcgctgcacgctggcctggtcggtgatgtccagggcaatcggcgtgctgccggggaggttcacgctgcctggatcgcgtgcgccggcgtagaccttggccgcgccggcttccagcaaggcaatgacgaatgctttacccaggccgcgattggcgccggtgaccagtaccacttttccacgaatatccatgatgcgctccagacagttgttaggtttaataatgaaaccgtttttatcctgagcctgttggtcctataatgcaaccttattttgcaagtgcccggaggcccaacgatgaaacgcaaatgcctggaaggcgatggctgcccggtggcccgcgccctggacgtggtgggcgactggtggacgttgttgatcatccgcgacgcctttgccggagtaacacgtttcggtgattttcaaaaacacctgggcgtggcgaaaaacatcctcgccacacggctcaaggacatggtcgagcaaggcctgttgcagaccagcgaagtcggtgcgcgcagcgagtaccagctcactgacaagggccgtgcgctgatgccggtgctggtgacgctggcgcagtggggccaggcctataccgagccggaggaggtcggcgcgcaagtcttggatgcgcgctcgctcaagccactgcgcaaggtcgagatcctcgccgaggatggccgagtgttgggcatcggcgacatcgtcacccagatgcccggggcttgaggcggtgcctacttgctgtcgaggaagcccagcagggctgcgttgaacaacgccgggtcttgcaggaacgcaaagtggctggtgttcggcaggatcagcaggccggcgccggggatggttgcggccatgtactcggtgtgttcgcgcttgatcgcttcgtcatggtcgccgtcggcaatcaggatcggcgtcttgatgctttgcaattgtgcgtcagtccagttcggttggctggcccacatatggctgatctgctcgacaaacgcgtcgtactctttcggcgtcggcgacagcttggcgtactccttgccggcgcgctcgatgaaggcggcaaaggtcgggttcttctcgacgccgtccttcacgcctgcggtctgggtgttggcggcgaaggcgaagactttgccgaggcggtccgggtgacgcagggccaggtcgatgccgatgatggcgccgtcgctccagccgacgatatcggcgctggggattttcaggtggtcgagtacggccaccacgtcatcggccatcaggtcataaccatagggtttttcatcccgcgaactgcgcccgtggccacggctgtcgatactgatcaccgtatgccttgccgccaaggccttgacttggttaccccaataatcggagttggacaggccgccgtgcagcagcaccaccggcgagccatggccggtacgggtgtagtagaccttgatgccgttgacggcggcatagccggtctgggcaccggccacaggggcgggcgttggcggcagcgtttcccagcgctcagcggcttgggcggcggaaaaacatagcatcaggcaggcggctgccagcaggcgacgtgacatggcggttcctttttttgatcaggagggattgaactctagcatcgccccccgcacggcaaatacgcatttttgcctatcaaaatcgcctgtgcgaaagaaaaaaatgcagttatatcaatggaataaaagcgtctaagcgagcgaggggcattttcttcaatacctcgaccgagtggcccccttaccgtggccccatcgtcattcgctcgaataacaaggaactgcaatgagtctgatcatttccatggctgccttcgcactcgccacgtctatcacccccggcccggtgaatgtggtcgcactgagttcgggagcgcgtttcggttttgtcgccagccagaaacacgtcttgggcgccgccgtgggcttcacgttgctgttggtgttgattggcctggggttgcatgaggtactgatacgttggccgatactcacccagttgatccagtggggcggggtggcttttttgctgtacatggcctggaagttggcggtagacgatggccggctcgacgccgatggcagtgccacggcgccgtcgatgctgtatggcgcgatcatgcagtggctcaaccccaaggcctggctggcgtgtgtggcggggatggggttgttcgtagccgatggcgatgcacggcaggtgtggttgtttgccgggctctacctggtgatctgctatctgtcggtggcgtgctgggcctatgccggcacgtttttgcggcgctacctgggcaacccccagggcgtgcgcgtattcaaccgttcaatggccgcgttgctggtggccagtgtgggttatttgctgatggcttgagcacgtcgcggtattgccctggcgttgcggcgaaatgctgtttgaacgcgcgctggaaatgcgcctggtcggcaaaccccgccgccagggccacgtcggcgatgggcgcgccctgacgcaatcgggcgcgagcgaactggatgcgctggttgaccaggaaggcatggggtgtcagcccgtaatattgcttgaaggcgcggatcaggtaggacggcgacagttcggccgccaggcagatgtcttccagcttcaccccttcggtgcagtgcgtgcggatgtactcggcggcccgctccagcttgtggttgacctcgcgcagcggggtgccggctgggttgaggcgctgttgtacgtcgctgaagtaactcaccagcgcgtcctgtttctgcaagtgctcggcctgttcatcgaccagaatgcggtacaactccagcaagccacggtacagcacggcgtcctgggtatggggcgtgttgaacggccggtaaccctggtcggtgctgaagcccaactgatgctgcaactccgtcagccagggcgtgtcgatgtacagcatctgataggaccacggctcattatcgatggggttgcaggcatgcacatcgccggggttcatcaacaccaccgtgccagcgctgatctggaacgtgtcggtgccatagtggtagtagctgcgcccgctggtgatcgcgccgatggaaaaatgctcatgggcatgccggctgtaggtgaccttgcgcccatcagcgatggtgcgcgcctcgatgaaggccaacgcggggtcacgccagaaacacggagcagtggcagcagtcatgggcgggcgcttcctcgcagcaggtgaacgggtagggcagcagcgtcagctaaaacccgccattgttcaagccctggcgtaccagtggtgcatagcgtcgcaggtagtcggcccatgggtcgttgccgctcaccgcctctgccagggtgatcggcagccgggcattttcacgtagcgcctcaccgtcatgcagcagatgccgctcgacgatgacacgggtcaatgcgcgggtgcgtggtgagtcgaaggtgcgcgggacccggcgtccgaagaggtccggtgcgggtattgcggcgggcgccaggttgtcgagttgacgaatgaccagggcgttgtcggcagtggtcagcgccacctcggccggtcgggttccttgcgcataggccggccagtcgaaacgcatccaggcactgctggcgccgttctcggccgcgtgtgtgacctgttcatagtcaaggtctggacgtggacgaaccagcaggtgcctgggaaagatttcatagaacttgcggtcgccgtagtgcgagacatacatcagcacgccgaatcggccgacatcggcagcccgccgctgggcaataccgaaaaaccccaccaggccgtactccagggcttcacgactgggcaaggtcaggtgcgacaaccaataccggatggcagtcccataagcgtctttcagttgcccgagcttgcggtcaaaggtctcgaaaaacagccggttgatcggggtcagcaaatggaattgccgagccatttcccggtatttgaccgctgtgtttgtggagtgccagcgtgtcgacgtgacatcgagcgcgccagcactgtgcaagtcgacgaacgagtacagtgggccgctgtacacaccttcgaaacggccttcttcggaaaatggcgagttttccggcaggtacatcaatactggttgatccaacagaggggtgttggggtaaaccctgcgcagatcttccagggcggtctggcgtagggtcaccacgggctgcgcaaacgtctcgagcgcggcggcaaggctggctcgctgttggttgaggctgtccagcgccgtgttgatcgcctgcacatcgtaatgcggttgagggcccagtatgccgttgaccacggcccactccagcaccggcggcgctgcttcgctgctctcgataaagcgtttccagctgccttgtggcgccagcccggccaggaacatgatctggctgtaggtcaattgacgggaagaccctggcatgaccttttccatgtacatgacgtattgacggtacaacacccaggtctgggcactgaggcaaggcgttgcgtcgggtatgccgcgtacgagcaagtgcgggcttttttcgctcagcaacaggtgcgcggccagtgctgcggtggctgcgtcgagcccgttcaggctgctatcgatgttctggcgtacaaacggcacgtgttcgccccagaagtaatcggagtgccagtcgattaggttgatacgggtggggtatgcatcaggctccgggtccaggctcaggatcagggcggcgagtatcagcgcggtgcggctgcctcgctccgtacgttcacctgcatggccgccatgccagtgcagggcgttcgacaaagcctctgccagttgctgggccaagggtgtcgcgagcaggcggaccatgaggaaatccgcctccgccctgacatcggctatggacttgccggcgacgatgggctggccgaggtactcgaacagcggcacgtcctggtcagccatgaagcgctcgatgatgcgcacaatctgcgcacgctcgagcaccgacagtttccaggccgaaggctgtgaaccgtacagcggcttgagcgctcgccagtagtgcccctgacgcgccggcagcggttggctgaccgccaattgctgcaaggtcaggcgtgcctcatccaaggtctcggggcgttcaaggtgatacaggcgcagcgcctgagaaagcgtgaccttgaaacgactgcgcaggtacccaccggttttagccgcgagctgtttgaggggagggaccagggaggcaagctcgatattgctcatcaccggatcggtcaggtttttccaggtgccatccaggccattggcgcccacgctgccggtggcgctgagcagcacatggctgtcggggtcgatacgttgctgggtgcggatggtcaggaagtccgggtgatcggtcagcgtgttgagcgccgcgtaggcttttttaacggtcgcctggagggtgtccgggtcgacgttgctgccgatatcgagcgtgtcggcatcgctcaggttgccgccatcgatcactgtcgataacccagcgcgcagcgcgtggcgatcgttgagcaggccgacgtactgccgatagcgatacagttcgccgaatgagcgggcgctgttcaataccaccgggggcgcaggcgccggccagttgcgcaggcgctcgctcaggaagctgacctctgtcctgttcagcgggcgttcgatggcgtacgcctgtaaaaccccgacaatactgatgcgccggtcgggataaagatgactgcccagttgttcgcccagcgttccaagcctgtgccaccgcgcatcgggcacatcgggcgccagggtgttcatctccagcccgctgtcggggctcagcacgcacaacacttgccgctggtaatcgtagtaagtgggccgcggtgcgtcgtctgtggtgcccaggtcgtggtgatcgatgattgcccgcaacagatcggcggcctctttaaggtttctggccagccgcgagtccgactgcagatacagcgcagtgctgtagacgtcgaaagcgttaaagctgttctcgtccctgaccagttgttgcagggcgtcagccagttgcacgtagtcgcgcgcctgctggcccagttcggcgtagctcatcgacttgctgcgcccgttgtcatcaaacccgggaaaaccttgcaaggcctcgagttcttcgacaatggtctgcgcctggaggcggttcgcaggcattggcaagccatggaacgccagggtcaggttcaagggaaagctgcgcacgccggcaggaggtacaggtgcgatatacggcatgcccagctcggtcgggtccaggagttggctgatgtagatgatcgggttggccagtgtccaccaggcggacgagtcggccaggcaatagaccttgggttgcccgtgagccgtcacgctgagccgactgttgtgcacccgcagcgtagcgagatcaaacccttgggcgttggcccagtcgatgaaatctttctggttgatggctttgcaaaaggcttcgcaccactggcccaactgtgaatgctcgatcatggttacggggtgcgtgggaagcggcaacgcttggttcgaggcggtggccaataggcgggtcagttgcgcgatcaagggtgggtcgccctcgttgcgcagggtctggcgctcgctcaggtaggcgctggaggggctgacactgagtggcaggggcgtgtcgctgggcaggttgtcccaggtcagggcaagggcgtgaatgtcatccatgagggcggttccggctgatcaaaccccggatgatccgccccagggatggggcatctgtagcaggcgtttcctgcaaggccgtggcttgcgtcagccacggcggcaaggttcaggccggcgctcagaagtcccagcgtgtcgccaattgcaggctgcgcggctcgccatagaacccggtgccgaagttgcccagcccggtgtagtactttttgtcgaacaagttcttcacgttgagtgtggtgctcaagtgctcgttgaagcggtagcgcgccatcaggtcgaccaggtagtagctgtcctgggtgatgcgcgcgttgtggccgaagttgacggtgtcagtcggatcgggctgggacacgttgccgaagaattcactctgccagttcaccccaccgccgacggtgacgttctctagggcaccgggcaggcgataggtgctgaacaggcgcaccacctgctgcggtgtggtggtttgcagcaccgagctgtagacgtagtcgtccttggcatcacgggtgtgctggtaggtgtagccggcggagacgttccagccgtccagcacttcacccgacaactccgcttcaaagcccttggtggtggcgccggcgatggggcggtacaccgagtcggtctcgaagcccgagacgtattcggccacgttgtcctgctggatacggaacgcggcaaagctggcgttcaggcgcccgtcgtagaacgcagccttgagcccggcctcgtaggtttcgccctcgatcgggtcgagcagtttgcggtcggcgtccttgctggtttgcggacggtagatctgggtgtagctggtgtacaccgaccaggtgtcgttgaggtcatagacgatgccggcgtagggcgtgaccacgccgctctggtgataagtggtgcggttatcggccttggtcgggtcgtagaaatcggtggtgtcggtgccgctgaaggtgctgacgcgggtgccgaggatcaccgacaaatcatcggtgggcttcaggcgcgtggccaggtaggcgccggtctggcgctgcacgatatcgttctggccgctgcgcgggatgtccggcttggcgtactcgccgtgccagtcgaagatactgccgcccaccgctgggtagatcgagccgtacaccggcacgtcctgtttcgagcgggtggccatgaagcccatgatcagttcgtgttcacggccgagcaggctgaacggcccgctgaggttgacgtccagggtgttctgcacctgatcgcccttgtacttgcccatgaacatgtacatgttctggccgctgaccgggtccgggttgccgccgctggcggatgcgagcagggtgtcgtgctggctgcgcttgcggtcgaggctgactttgagtgaccagtcgttcgccagcttctgctgcaccgaggcgaacagcgtctggttctggaagtcgcggcggctccagtcggcggccgggttgaacgaacgcgaaaagttcgtgcgcgagccgtcgctgaaatacatcgggaatccggtccagctggcaccacgtgagcgggtgtcctgctggtcgatgccgaaggtcagcagggtgtcgggtgtgaggtcggcttcaaggatgccgtaggcgatgtccttggtgttctggtagtggtccaggtacgactggcgatcctggtacacaccgacaaaacgcccgcgcacattgcccgacgccgtcaaggggccggagatgtcgccttcggtgcggtagttgtcccaggagccgaaggtctgggtcaccgaagccttgaacgctgccgtgggttttttgcggatcaggttgaccgtggccgaggggtcgccggaaccgctcagcaggccggccgaacccttgatgatttccaggtggtcgtacaccgccatgtcggtgctggtggtgccgtagtcatacacgccgtcataggtggaattgacaccgtcgtactggaaattggtgatcggcaggccacggctggaaaactcccagcgctcgctgtcgtagttctgcacgctcacgccgggggcacggcgcagggtgtcagcgatgctgttggtgccctggtcgtccatttgctggcgggtgatcaccgtgaccgactgcggggtttcgcgcatcgacagcggcaggccggtggccgaggccatggagccggtggtgtacgaatgggtgtcttccgtggtggcgcccaggtcctggcccgaaatcgtcgtggcggccagctccagggcgccggtgttggtcgggatcagttccagtacgtagccgttgttgccttggggcagggcctgcaaaccgctgccctgcaacaggcgctgcaagccggccgccggggtgtagctgccattcaggccggggctggttttgccggcggccaggctgttgtggcccgcgatgaaaatacccgactgctcggcaaagctgttgagcacgctgaccagcgggccggcagcgatgtgatagctgcgtgaagcttcctgggtcgagggcgattcggcggcttgcagcgacggtgcgcccaggcaaaacagcgaggtggccagcgccagtgggcgcagcgcgaagcgggcaggttgcgacatggatgtttccctttggatcagatcgatcggcgaattgaaagcgtctgctgggttaaccgaacgaaggtgggaaaagggaactggtgctgagcgtttttttactttgggccgacagtgacccaccacggcatcggtttatccacgcgaatcggcagcgccgcctgcaacaaacccagggcgtggtcgctgtcttgcagcgggaatgaccccatcaccggcaagtgcgccacggctgggtcgcagcccaggtggccggggcgatagcgattcagttcggcgatcaattggccgagcggcaggttatccgccagcagcacgccccggctccaggcttcacgggccggggaggcgggcagggtcgggttgaaaccgttggcggtgaacgacacttgttggccggtttcgatgatgcgcacgtgctggtcgagggcggtgacttgcacccgcccttcgaacacgttgagctgggtgtggtgttcgccgtgcagcacactgaaacgtgtccccaacgcctgcaggcggccgtgtccggtgtccactaggaaaggccggagggcgtccttggcggtgtcgatcagcacttcgccaaagcgcaactgcaataaccgctgcaccgcatcaaagcgcacgtccacagcgctcaaggcgttcaaccacacatggctgccatcggccagcagggcgtcgcgcgtctcaccgctaccggtggcatagtccgcgcgccaaccgccgaccaaccggggcaggacggtgttgcgccaagcgccccaggccaatgtcgaccccccgcacagtaccagcagcgtcttgagggtttgccggcgcgagctgcgcaacgcccggctcgcgccatggggttgctccatcaagggcgcaaagcgctggctgacgcgttccacgtactgccatgcggccaagtgctcggggttctgcgcgacccaggtttgccagcgttgctgttcctgcgtacccgccgggtcctgcaggcgcacgtaccactgcgcggcctgttccaggctggcgtggctgagcttgccgggcgtgttcattgcaccaccatcccgtcgagctcggcttccaagatcgcgcagtgcagcagggcctgggccaggtatttcttgaccatgcgttcgcacacgcccaattgcaggccgatctgtttgtagggcaggccgtgcagttgagcgagcaggaaggcttcgcggacgttcctgggcaggcgagcgagcatggcgtccacttcgtagagggtttcgacgatgattgcccgttgctccggggacgggtgcgtgtcttccgggcgttgcgccagcgactccaaccaggctttttccagttggcgacggcgccagtggtcgatgcacaagccacgggcgatggtcgccaggtacgagcgctggcgcacgtgatcggtctcggccaccgggcggttgaggatgcggataaaggtgtcgtgggccaggtcggcggcatcccagcggtcgttcaggcgccggcgcaacaggccgagcagccagctgtggtgggtgccgtagaggtgggtgaaagaggtcgacacaatatccatccaacgcaaaaggattggcgtaaataagaattggtcgcgattaaagcaaagggagggggcgtgcgcaaatgatattggattgctattgggtgcaatcccctcccaggtttgaagggtgtcaggctggaaccaggaaagccgcctccagcagttgccgggtgtaggcatgttgcgggtcggcaaagatcgccttggcatccccttgttccaccacctgcccatgcttgaccaccatcaactggtgactcaacgccttcaccaccgccaggtcatggctgatgaacaggtaggtcaggttgtacttggcctgcaggctgcgcagcagttccaccacctggcgttgcaccgtgcggtcgagggccgaggtgggctcgtcgagcaggatcaggcgtggcttgagcaccagcgcgcgggcgatggcgatgcgttgccgttggccgccggagaactcatgggggtagcgatgccgggactccgggtccaggcccacttccttgagcgccgcgataatcgccgcttcctgttcggccggcgtgcccatcttgtggatgcgcaagccttcgccgacgatctcactgacgcacatacgcgggctcaggctgccgaacgggtcctggaacaccacctgcatttcccggcgcaacgggcgcacctgctgctggctgagcgtgtccagttgctggccttcaaaacgaatgccgcccttgctggcgatcaaccgcaggatcgccaggcccagggtggacttgcccgagccgctttcaccgacgatgcccagggtctgcccctgaggcaggctgaagttgataccgtccaccgccttgacgtagtcaaccgtattgcgcaaaaaacctttcttgatcgggaaccacactttcaggtcatcgacctccagtaacggtgggccaacctcgttggtcgccgggccgccgctgggttcggccgctaacaactcctgggtgtacgggtgctggggcgactggaacagcgtctcgcactccgcctgctcgacgatgcagcccttttgcatcacgcatacgcggtgggcaatccggcgcaccaggttaaggtcatggctgatcagcaacagcgccatgcccaggcgtgcctgcaattccttgagcaattccaggatcttcaattgcaccgtcacgtcgagtgcagtggtcggttcatcggcgatcagcaactccggctcattggccaaggccatggcaatcatcacccgctggcgctggccgccggacagttcatggggcagggccttgaggcgcttgtgcggctcgggaatacccaccaggtccagcagctccagggtgcgctgggtggcgaccttgccttgcagccccttgtgcaggcccagtacttcgttgatctgcttttcgatggtgtgcagcgggttcaaggaggtcatcggctcctggaagatcatcgcaatgcggttgccgcgtatgtggcggatggttttttctttcagggtcagcaggtcctgcccggcatactcgatggtgccagaggggtgacgtgccagcgggtagggcagcaggcgcaggatcgagtgagcggtcaccgatttgcccgagccgctttcacccaccagtgcgatggtttcaccgcgcttgatatcgaagctgacattgttcaccacgcggtggtggtgttcgcccgtgacgaactcgacggagaggtcgcggatttcgatcagattgtcctgattcatctcatttcctcgggtcgaaggcatcgcgagcggactcgccgataaacaccagcaaactcaacatgatcgccagcacggcaaaggcactcatgcccagccacggcgcttgcagattggatttgccctgggccaccagttcacccagcgacggcgaaccggcgggcaaaccgaagccgaggaagtccagagcggtcagcgtaccgatagcgccggtgaggatgaacggcatgaaggtcatggtcgacaccatcgcattgggcaaaatatggcggaacatgatcgcgccgttctgcatgcccagggccctggcggcgcgcacatattccaggttgcgcccgcgcaggaactcggcgcgtaccacgtccaccaggctcatccacgagaacagcagcatgatccccagcagccaccagaagttgggctgcacgaagctggcgaggatgatcaacaggtacagcaccggcaacccggaccagatctccaggaagcgctgcccggccaggtcgacccagccgccgtagaaaccctgcagcgccccggcgatcacgccgatgatcgagctgagcacggtgagggtcagggcgaacagcaccgacacgcggaagccgtagatgacccgcgccagcacatcgcggccctggtcatcggtgcccagcaggttgacactggaaggcggcgcgggggccggcaccttgaggtcgtagttgatgctctggtagctgaacgggatcggcgcccacaaggtccaggcgtccttggccttgagcagctcctggatgtacgggctcttgtagttggcctccagcgggaattcgccgccgaatgtggtctccgggtagcgcttgagcgccgggaagtaccagccaccgtcgtaatgcacggccaggggtttgtcgttggcgatcagctcggcgcccaggctcagcacgaacaggatcaggaacagccacagcgaccaccagccacgcttgttggccttgaaacgttcgaaccgacggcgattgaggggggacaggttcatctcaatgctcccggctggcaaagtcgatacgcggatcgaccagggtgtaggtgaggtcgccgatcagtttcacgatcagccccagcagggtgaagatgaacagcgtgccgaacaccaccgggtagtcgcggttgatcgccgcttcaaagctcatcaggcccaggccgtcgagggagaagatcacctccaccagcaacgaaccggtgaagaagatcccgatgaaggccgaggggaaaccggcgatcaccagcagcatcgcgttgcggaacacatggccgtagagcacacggtggttggtcaggcccttggcttttgcggtgaccacatactgtttgttgatctcgtcaaggaagctgttcttggtcagcagggtcatggtggcgaagttgccgatcaccagggccgtgatgggcagcgcgaggtgccagaagtaatcgaggatcttgccgccccagctcagctcatcgaagttgttagaggtgagcccacgcaacgggaaccagtccaggtaactgccgccggcaaacaccacgatcagcaggatcgcaaacaggaacgccgggatcgcgtagccgacgatgatcgccgagctggtccacacgtcgaaatggctgccatgccgcgtggccttggcaatccccagggggatcgacaccaggtacatgatcagcgtgctccataacccgagggaaatggacaccggcatcttttccttgatcagatcgatgaccttggcgtcgcggaagaagctgtcgccaaaatccaattgggcgtagttcttgaccatgatccacaggcgttcaggcgccgacttgtcgaagccgtacatcttctcgatttccttgatcagcgccgggtccaggccctgggcgccacggtagctgctggaaccggccaccgacacttcggcgccgccgccggcaatgcggctggtggcgccttcaaaaccttcaagcttggcgatcatctgctccacagggccaccgggggcagcctggatgatgacgaagttgatcagcaggatcccgaacagtgtggggatgatcagcaacaggcggcgaaagatataggccagcatttaatcgcctccactcgccggatcggcgctggtgttggtgtctgggatgacggccggtttgacgtcgggcttggcccaccaggtggcggtgccgacgtcgtagcgcggtgggaccttcgggtggcccaggtgatcccagtacgccacgcggaaggtcttgatgtgccagttggggatcacgtagtagccgaactgcaacacgcggtccagggccttggcatgcgccaccaggcttttgcgcgaatcggcgtcgatcagctcttccaccaactggtcgatggccgggtccttgaggcccatgtagttgcggctgccgggcttgtcagcgctggacgatttccagaactcgcgctgttcgttgcccggtgaagtggactgcgggaagctgcccaccagcatgtcgaagtcccgcgagcggatacggttgatgaactgcgacacgtcgacccggcggatcaccaggttgatgcccaggtcggccaggttgcgcttgaacggtagcaggatgcgttcgaactcggtctgggccagcaggaattcgatagtcaccggtttgccggtggtgtcgaccatcttgtcatcgacgatgcgccagccggcttcctgcagcagttggtaggcttcgcgctgctgggcgcggatcatgccgctgccgtcggtcctggagggttcgaaggcctgggtgaagacttcgggcgggatcttgtcgcgcaggggctcgagaatcgccagttcatccgggccgggcaggccggtggcggccatttccgagttttcgaaataactgcgcgttctggtataggcaccgttgaacagctgtttgttgctccactcgaaatccagcaacaggctgatggccttgcgcacgcgcacatcctggaacatcggtttgcgcatgttgaacacaaagccctgcatcccggtggggttgccgttggggatttcttccttgatcagccggccctgggcaacggcgggaatgttgtaggcattggcccagttcttcgcgctgaattccagccagtagtcgaactgcccagccttcaacgcctccagcgacacggtgctgtcgcggtagtagtcggtgatgcggttgtcgaagttgtagaaacccttagtgatgggcaggtccttggcccagtaatccttgacccgctcgtagcggatcatgcgcccggccttgacctcggcgaccttgtacggcccgctgcccagcggtacttccagattgcccttggcaaagtcgcgggtggcccaccagtgcttgggcaataccggcagttgcccgaggatcagcggcaattcacggttattggtgcgcttgaacttgaacagaaccttgagcgggtcttcggcgatcacttcgtcgacgtcggcgtaataggtgcggtagatcggcgagccttccttgatcagttcctggaaagtaaacaccacgtcctcggcgcggatcgggtggccatcatggaagcgcgcttccgggcgcaggtagaaacgtacccagctgttgtccggagctttttcgatcttgccggcgaccaggccgtattcggtgatgggctcgtccaggctttgcatggccagggtgtcgtagatcaggcccaggttgtcggccggtacacctttgctgatataggggttgaggctgtcgaagccgcccatggccgactcgcggaacgtgccacccttgggcgcgtccgggttgacgtagtcgaagtgcttgaagtcggcggggtatttcggcggttcgttgtacagcgtcaacgcatgttgcggggcggcgtgggccgcagtgcacagcagcaggctgccgagcagggcagtacgcaaagatatcattgggctttctccgaagctttcagccaccacgcgctcaggcccaggctgtagggcggcgtggtgacaaaggcgaaccggtcgcggtacgccaggcgatgatagttgaggtaccagttgggaatgctgtagtgctgccacagcagcacccggtcgagggcacggccggcggccagttgctcttcgcgggtcttggcggccagcagttgttccagcaggtgatcgacaatcgggttattgatgcctgcgtagttcttgctgcccttgatcgccgcctggctggagtggaagtactgccactgctcaaggcccgggctcaaggtctggttgagggtgatcaggatcatgtcgaagtcgaattgatccaggcgctgcttgtattgggcgcggtcgacggtgcgcaggcgcgcgtcgatgccgatgctgatcaggttctcgacatagggctgcaggatgcgctccaggttcgggttgaccagcaggatctcgaagcgtagcggctggccatccttgttcaccaggcgctgcccggacagcttccagccggcctcgccaagcagggccagcgcgcggcgcatggtttcgcgggggatgccgcgcccgtcggtctggggcaggctgaaggcttgcgtgaacaggttggccggcagttgctcgcggtacggcgaaagcatcagccattcatggccggtgggcacgccggtggcggcgaattcgctattggggtagtagctcaaggtgcgcttgtacgcactgctgaacagggtgcggttggtccactcgaagtcgaacatcagccccagggcttcacgcactttggtctggctgaaggtgggccgccgcgtgttcatgaacaggccctggctctgggtcgggatctggtgggcgatctgcgccttgatcacgtcaccccggttcaccgccgggaagttgtagccattggcccagttcttggcctggtgctcgatgtagatatcgaactcaccggccttgaaggcttcgaaggccacatcgctgtcgcggtagaactccacctcgaccttgtcgtagttatagaagccctggttcaccggcaggtccttgccccagtaatccttgacccgttcgaacatcagttgccgcccgggcgtgaccttgctgatgcggtaggggccgctgcccaggggcggttcgaaggtggtggccttgaagtcgcggtttttccagtagtgctggggcaataccggcaattcgcccaggcgcaggatcagcaaggggttgccggcacgcttgaacacaaagcggatgcggtgtcggttgagcacatccacccgcgccacttcctgcaggttggtgcggtattgcgggtgcccttcggtcagcaaggtgcgataggaaaacgccacgtcatacgcagtgatcggcttgccatcgtggaagcgcgcttccgggcgcaggttgaacaccacccagctgcggtcctcgctgtactccaccgattgggcgatcagcccatagctggaggtgggttcatcgccggagggcgcgtacaggccggtgccaaccatcaatggctcattcagctcattgacgccatattgcaggaagttcggcgtggacaccgggctggagcccttgaaggtataggggttgagggtgtcgaaagtgccaaaggccatgacccgcaaagtcccgcctttcggcgctgcagggtttacccaatcgaagtgggtgaatttggccgggtacttgaggctgccgaactgcgcataaccgtggctctcggtaatcgtcgcgttcgctgcaaagctcaaggccagacttattagtagaaggaggggacgcttcaagtcagagatccgatccaggcggcttgggctttatgatcggtacagtaacagcttgttccggttggaaaaagccagtcggctgatgcagggccaatgtgggagggggcttgcccccgatagcggtatacctgccgatgaatctgttggctggtacattgctatcgggggcaagccccctcccacatggattccccagttttcttgaaccttagcgtggacctgataccaccagcatctgcccaggcttcagggcctggccggtacgcgggttccagcgcttgaggtgttgcatctcgacattgaagcgcttggcgacgatgtacaacgagtcgcctttcttgaccttgtattgcaccggcttcttgctgtcggccttggccaccagcttgcgcgtgtcctgcatcaccagggtctggccgaccttgagcgcctggccgttgagcttgttccagcgctgcaggtcatgcacgtcgaccttgttggccttggcgatcagcgtcaggttgtcgccggtgcgtaccttgtagctgcgggtacgcccggccacccgtgcggtctcgacttcgtcgaacacctgctttttaggacgcatcgccagcaattcttcaggcttcatcgtcgaaagcgtgctggtcagcaattgcgccttggaactgggcaccagcaaatgctgcgggccatccagggtggtgcgttgtttcagcgccgggttgagctggaacagttcgtcttcgtcgatctcggccagcgcggcaacccgggacaggtccatgctctgcttgacttccaccacttcgaagtacggctggttggcaatcgggttcaggttgacgccataggcctcgggtgccagcaccacttgggacagcgccaggaacttgggcacgtagtccttggtttcctggggcagcggcaggttccagtagtcggtcggcaggccgagcttctcgttgcgctcgatggctcggctcaccgtgccttcgccggcgttataggcggccagggccagcagccagtcgccgttgaacatgtcatgcaggcgggtcaggtagtcgagggcggcggtggtggaggcggtgatgtcgcgacggccatcgtaggcgcgggtctggcgcaggttgaaatagcgcccggtggaggggatgaactgccacaggccgaccgcatcgctgcgcgaataggccatcgggttgtaggcactttcaatcactggcagcagcgccagctccaggggcatgttgcgttcttcaaggcgttcgacgatgtagtgaatgtagaggctgccgcgttctccggcgttctccaggaaggacgggttgctggcgaaccacaggcgctgttgctcgatacgcgggttgacgcctaacccgtcctgcagctgaaagccccggcgcatgcgttcccaaacatcctggggcacatcgggcgtcggtttttctgaaagccagatgacgggtttctgtttgattttggcggtaaggtttggcttgggttgcacggtggattgtgcggtgaaattgcttgattggcagcccgccagtgtggcggacacagccaccgccacagcttgagccaggcgggtcaatgcgtctgaatggttggatttacgaatagatgacgacattggctggaagtaagttccgggcaaaaatgtcgggcgattctagaaacccgctgggttccggtcaaccattcagaaattacgtatcagattgcttcccgttagaacttatctttccaggccctcaagctagcaaacacctcggccccagagcggttgtcgcggccgttccgttcgtccgctttttgtttaacggatgtttcagaggtgcgtagaaatgggttggtcagcttttccagggccaggttggaaggcagcgtgatctcgcccctggcgcgcagttggcgtacgttttccactcgttcggctatatctgtgttatccggttccacagcctgggcgaacttgaggttactctgtgtgtattcgtgggtgcagtacaccaaggtttcggcgggcagggcggccaggcgttcgagggaggtgtgcatctgttccggcgtgccttcgaacaggcgcccgcaaccggcggcgaacagggtgtcgccacacaacagcacgcctggatgataaaaggcgatatggcccagggtgtggccgggcacgctataaatgtcgaagtcccagccgagtaccgtgatgcgctcgttatcgtgcaacgccacgtcccgcgccgggatcctctcgttggccgggccgtagaccttggcgtcggtctcacgcttgagctgttcgacaccgccgacgtgatcgtggtgatggtgggtgatcaggatgtcgctgaggctccagccagggttctgctcgagccaggccagcaccggcgcggcatcgccggggtcgactacggcgcagcgttgggtgcgagggtcctgtaacaaccagatgtagttatcggtgaaggcgggcagggcactgatctgtatcattcttcgattcgccaagctgaacacattggtgcatcttagaacgtctaggcgagttggagaatgcaatgactgataaagcgttcgcccaggccgatcctgagtggctggccctgatcggcgcggcccgcgagtggctgtccggtcccatcgggcaatttctgctggacgaagaacggcgcatgctcgaagacgagctgggccggttctttggtggctatctggtgcactacggcccctcggccgaaacgccgccctgcgcgccgcaggtgcaacgtaatgttcgcttgggggcaccgttgcctggcgtggagattgtgtgcgaggaacaggcctggccgttgagcgaacatgctgccgatgtggtggtgttgcagcacgggctggatttctgcctgtcgccccatggcttgctgcgcgaggcggcgagcagcgtacggcccggtggccatttgctgatcgtggggatcaacccctggagcagttggggcctgcgccatgtgtttgcccatgatggcctgcgccaggcgcgctgcatctcgccgcaacgggtgggcgactggctgaacctgctgggcttcgcgctggagaaacgccgcttcgggtgctatcgtccgccgctcgcgtcgaccaagtggcagggccgcctggccggctgggagcgccgggccggcgcctggcaattgtccggtggcggcttttatctgctggtggcgcgcaagatcgtggtcgggctgcgccccgtgcaacaggtgcggcgtgagccgatgggcaagttggtgccattgccgatggccaaggtcaaccgcaagcaaagcgaagcgtaaccctctttttgaattgataccgagcaaccgatgaccgatagcgtagaactcttcaccgatggcgcctgcaagggcaacccgggccccggcggctggggcgcgttgctggtgtgcaaaggtgtggagaaggagttgtggggcggtgaggccaacactaccaacaaccgcatggagctgatgggcgccattcgtggcctggaagaactcaagcgccgctgcaatgtgctgctggtgaccgactcgcaatacgtgatgaagggcatcaacgagtggatggtcaactggaagaagcgcgggtggaagaccgctgccaaggaaccggtgaaaaacgccgatttgtggcaactgctcgatgagcaatgcaatcgccatgacatcacctggaagtgggtgcgcggccatatcggccaccccggcaacgaacgtgccgaccagttggccaaccgtggcgtggacgaagtgcggggctacaagcagagctgatgctgactcacgtgttaacattgcgccctttgactcacaccacaccgttgagagctgaaccctgatggccatccgatctgttgtactcgataccgaaaccaccggcatgccggtgactgacggccaccggatcattgaaatcggctgtgtcgaattgatggggcgtcgcctgacgggtcgtcacttccacgtctacctgcaaccggatcgtgacagtgacgagggcgcgatcggcgtccacggtatcactgacgaattcctcaagggcaagccgcgttttgccgaagtcgccgatgagtttttcgaattcatcaacggcgcccagctgattatccataacgcagcgtttgacgttggcttcatcaataacgagtttgccctgatggggcagaccgatcgcgcggacatttcccagcactgctcgatcctcgataccttgatgatggcccgtgagcgccacccgggtcagcgcaacagcctcgacgccttgtgcaaacgctacggcgtcgacaactccggtcgtgaactccacggcgccttgctcgactccgagattctcgccgacgtctacctgaccatgaccggtgggcagaccagcctgtccctggcgggcaacgcctccgatggcagcggctcggcggaaggctccggcaaccgtccttcggaaatccgccgtttgccggctgatcgcaagcccaccaccatcatccgtgcgagtgagcaggatatggctgaacatgcggcgcgactggaggcgatcgccaagtcggcgggcgcgccggcgttgtggacccagctgacccagcaataacccctggctggactcgattaaaaatgtgggagggggcaagccccctcccacaattgatttcaattgcctgtaaatcttcattcgcgtcatggtcccccagcttctacccttgagtgcatagccctcaggacgacaagcactcatgtacaaagacctgaagttccccgtcctgatcgtgcaccgcgacatcaaggccgacaccgttgccggtgaccgggtccgaggcatcgcccgggagttggaacaagagggcttcagtattttctctgcagtggactacgccgaaggcaggctggtggcgtcgacccatcatggcctggcgtgcatgctgatcgccgccgaaggcgctggcgaaaacacccacctgctgcagaacatggtcgagctgatccgcctggcgcggctgcgggcgcccaacctgccgatctttgctttgggtgagcaagtcaccctggaaaacgcgcccgccgacgccatgagcgaactcaaccagttgcgcggcatcttgtatctgttcgaagacaccgtgccgtttctcgcccggcaagtcgcccgtgcggcccgcacgtacctggatggcctgttgccgccgttcttcaaggcgctggtgcagcacacggcggattcgaactattcctggcacacgcctggccatggcggcggcgtcgcctatcgcaagagcccagtggggcaggcgtttcatcaattctttggggaaaataccctgcgctcggacttgtcggtctcggtgcccgagctgggttcgctgctggatcacaccgggccgctggccgaagctgaagcgcgcgccgcgcgcaactttggcgccgaccacaccttcttcgtgatcaacggcacctccaccgccaacaaaatcgtctggcattccatggttgggcgcgatgacctggtgctggtggaccgtaattgtcacaagtcggtgctgcattcgatcatcatgaccggcgccatcccgttgtacctgtgcccggagcgcaatgaactggggatcatcggcccgattcccctgagcgagttcagccccgagtcgatccgcgccaagatcgacgccagccccttgacccgtggccacccgccgaaagtgaagatggcggtggtcaccaattccacctacgacggcctgtgctacaacgccgagctgatcaaacagcaattgggcaacagcgtcgaggtgctgcattttgatgaggcctggtacgcctacgcggcgtttcatgagttcttcgccgggcgctacggcatgggtacctcgcgcacgccggacagcccgctggtgtttaccactcactccacccacaaactgctggccgctttcagccaggcttcgatgatccacgtgcaggatggcggcgcacgtcaactcgaccgtgaccgtttcaacgaagccttcatgatgcatatctccacgtcgccgcaatacagcatcattgcctccctggacgtggcctcggcgatgatggaaggcccggccggacgctcgctgttgcaggagatgttcgacgaagccctgagcttccgccgcgccctggccaacctgcgccagcatatcgccgccgaggactggtggttttccatctggcagccaccgtcggtggcggggatcgacaaggtcgccaccgctgattggttattgcacccccaggatgactggcatggcttcggtgatgtagccgaagactacgtgctgctggacccgatcaaggtgacgctggtaatgcctggtctcaatgccggcggggccttgagcgattgcgggatcccggcggcggtggtgagcaaattcctctgggaacgcggcctggtggtggaaaagaccgggttgtattccttccttgtactgttctcgatgggcattaccaaaggtaaatggagtaccttgctcaccgaattgctggaattcaagcgcagctacgacgccaatatcagcctggccagttgtttgccatcggtgtttgcccaagggccgacgcgctaccaaagcatgggcttgcgcgacctgtgtgatcaattgcacagctgttatcgcagcaacgccacggccaagcatctgaagcgcatgtacaccgtattgccggaaatcgcgattaagcccgccgacgcctacgaccaattggtgaggggcgaagtggaggcggtttccatcgacgccttgccaggacgcatcgcagccgtgatgctggtgccttatccgcccggtattccattgatcatgccgggcgagcgctttaccgagtcgacgcgctcgatcatcgactacctggcgtttgcccggacgttcgatagcagtttccccggttttgtcgctgatgttcatgggttgcaacacgaagatgacggcagtggtcgttgttacaccgtcgattgcatcaagggttgaggatggttatgcaagctgtaatgaacccgaagtatccggggctcagtgtacgggtcgccgacgagggctttgatgcctacgtgtggggtaatgacttcagctttgaagtcagcgcctacggtgagccgcaaatgggcaagcgggtcgaccagtggcccgtggagcgtatcttgccgtaccgcaagtgctacggcattgaccctgaggagttcgccagtttccgtgacgcgcccgacagtgcgatcttcatggcttacctggacgaccgcgcggtggggcacatcgtggtcagcaccaattggaacggctttgcccatgtcgacgagttggcggtggccctgcctgcgcgacgccatggggtggccaaggcgctgctagatgtggcgcagttctggagccgcaagaaaagcctgcccggcatgatgctcgaaacccagaacaacaacctcggtgcctgccgcttgtacgagcgttgcggctatgtgatgggcggcatcgaccatctgcgctatcgcggtatcgacccgcagacccgcgaagtggcgatattctggtatcggttgttcaaaagcgaagccgacaacgcttaacccgccagcaaaccctcggccttctgcgtcacgatctccagcaacgcattcaacgccggggaggtcgggccatccttgagcgtcagcgcatacaggctgaccatgatcggcggcgacaccgggcacgcatccagcccggcctcgcgtgcgccgaacgcggtgaacgggtcgaccaccgccaggccttcgcctgcttccaccatgctgcgcatcatctggtaggtctgcacccgcgtctgcactaccggcagcgggcgcaaggcttgcagcttggcgtccagcaggcggctgagcgggtcctggccctccaggccgatcatcgactgcccggcgaggtcctgcagcgcaatgtacttctgcttgggtttcagccagccatggggcgccagcagttgcagcttgccctgggcgagtacggtgcagtggatctgcgggtgttccgggtcatgcaggctcaagcccacatcggcttcgtgcagcagcaggctcctgacgatctcgcgggtgggctggctcgacaggttgcagggcgtgtcctggaagcggcggcgcaataccgcaatgctttgcggcaacagctgattggccaggggcggtgtgcagagcacgcgcagggtaggggcatgatggtttttcaggcggctggccaggcgttgcaccggctccagggcctcatacacatgggcaatttccgcctgcagttccagggtttcccgggtggcctgcaagcgcccgcgtacgctggcgaacagcatgaagcccaattgctgctcggcgtccttgagcgccgcgtccacctcgcccacggaaagttgcaaccattcggcggccgtgccgaggtgtccggtctgcaagatggcctgaatcacttcgatatgacgtaaacgcatcgccggagtctatgtgcagcgggccgggtattcaatagaatggctgcgctgatcattaacgaccaaagccggctgccggcattaacaacaaaaacaggtctggtctcacatgcctctaccctcgatattcctcggggtaacggtcaagcaactgctggtcctggtgaccgtagggtgcgtggctgcttatctcttcaacagtcaaaacgataccgcgccggagaacctggcacttgaagcgtttatccgttcccaggaacaggtcgtcgaacaggtgggagcggtgctgggtattgaactggtcaggcaggtggtggcgcatccaggctacaacacggcaggctaccagcgttccatgttcgcggtggagggtgagcgggggagattggtggtgaccgtgaagaaggtcgagggcgagcagggcattgaagtgacggagatccgccgtccgtgatcaccccagcccagtcaacgccgtcaatggccaggactgagcaggtggataaggcgggatcttatgacgcgagggtggtttgcgattcgcgcacgagaatggtgcccgactggatcagcttgaattcgtcgccttccagtttctctacacggtcgccaatggccagcttgtaggtaatggtaggtgccgagccagccaggtcgccttgcgccgggttggattcctggaactcatgcaccgaatacacgcgtccttctgcgtctctggcatgaaactgtccgactaatactgctgccatctgtttagaacctctggagataaacactcgatttgcggttctgtagaccgtcatggagcggggtagtttacttacggaataaaaatactattcgccgacgttttcagatgcttcctacatagtgttgcgcagtgcaaacaaccgcaggattatcaaaaccttctggtgaaccggtcgcgaagactctataactacaagctccttttagtcagacgtcgggaaaccccaatgagcaaggtctacaccgtcgccgtcgtggtcggcagcttgagaaaagactctatcaaccgcaaggtcgcgctcgcattggccgaactggcccctgccaacctgaagttgaacattgtggaaattggcgatttgccgctctacaacgaagacattgacggagcatcaccgccggcagcctacagtactttccgcaaacaggtgagctcatccgacgcggtgttgttcgtgaccccggaatacaaccgctccgtcccggccccgttgaagaatgccattgacgtgggttcccggccctacgggcagagcgcctggagtggcaagcctggcgcgatcatcagcgtatcgccgggtgcgattggcgggttcggcgccaaccatcacctgcgccagtccctggtgttcctcgatgtgccgtgcatgcagcagccggaggcttacctgggtggggcgggcgccgtgtttgatgaggggggcaaggtctccgagaaaaccaagccgttcctgcaggccttcattgacgcctatagcaagtgggtggccaaacagcacggttgattacaaggaggcccggccgcaatggccgggcttttttgcgggtcaggccagttgatctgccaacaacagagcgagcgccgtgttgttgaggcgtgatgcctgatcgacctccggccccaggatggtcttttccacgtacaacgaatgcacgtccgtcaccccgataaagcccagccaggcgtccatatagggcttctggaaatccatcgcctgggcgtccggcgccgaaaaatccataccccgcgcgtacacattcaccgctgtcttgttgcgcaataacccgcgcaggccgtgctccgggctgaactcgaacagcacatctttctgcgacaccacatcgataaagtgcttgagcttgtaaggcaccgcgaaattccacagcggcaccgagaacaccagcacgtcagcctgatgcagctgggcggcgagtgttttgagtgcagaccaggcgatggcttgttcctcagtcaacggcgtaccgctgagcccggcgtacttggcgtccatcaccgggccgtcgaattcgggcagctccaatgcccacagatccagcgtattcacttgggtgtccggcgcgttttgttgatagcgggcaataaactggcgagcgatttccaatgatgcggagcgttgtttgcgcggtgagcattcgatgtgcaggagcgtagtcatggcaggcctcggataaagatgacccgagcattgcaacatagcgttgattgaaatataaatcgtgttttactagctcattgattgcgtatcaaaatatgttcgatagcgtattgctcaaaaccttcgtctgcgtcgtggatgagggcggcttcagtcgcgccgccgagcgtttgcacctcacgcaatcggcggtcagcgggcacttgcggcgcctggaggaacaggtgggcaagccattgctcacgcgcaccacgcgttctcaacagctgacagcggacggcgaacgcctgatggcgtatgcgcggggcatcctggcgttgaatcgtaatgcctgggccgagctgacgcgctcggcgttccagggaaacctgcgcgtaggcgtgtcggaagagtttgcgcaggcacgcctgttgcgcgagttgcaggaagtcgccgcgcactatcccggtatgcaaatcactgtacaggtcggcattcccggttcgctgctggcgttgatgaagcagggcgaactggatgtggtggtgggatcgttgtgtgaatccagcgagcccggcctggcgttgtggcaggaaccgctggtgtgggcctggtccgccagccgatgacgacattgcctgcgcccttgcccctggcgttgtttcccgaaccatgcccttaccgcgaagcggcgctgtcacgcctggcccaggccggcatcgcccagcgcaccgccatgctctgtacgagctacgccgcgctgcatgccgctgcattggccgggtttgccatcgcccccatcgcccgtagccaactggtgcccggcttgaccgtgctcggcgccgaacacggtttacccgcgctgcccgatgccgaattccgcctgttcagtgcgccggacgccgaccctcgcctggtcgaggtgatcacccaggtagtggtccgctacggcgcttccttgcgctagcgcggctcagcgcagccagttggtgcgggccagttcgatgacttcatcgccgcggccgctcatcaccgccttgagcatgtacaggctgaaccccttggcctgttccagcttgatggtcggcggcatcaccagttcctgagtggcggtgaccacatccaccagtaccgggccgtcatgggccagggcgcggcgcagggccggttccaggtcctcggattgctccacgcggatgccgaggatacccatggcattggacatggcggcgaagtccgggtttttcagctcggtgccggcgtccaggtagcccgccgccttcatttccatggcgacaaagcccagggacgagttatcgaacacgatgactttgactggcaagttcagctgcgccagcgagatgaagtcgcccatcagcatggcgaaaccaccgtcacccgacatcgagatcacctggcggcccgggaatgctgcctgcgcgccaatggcctggggcatggcgttggccatcgagccatggttgaacgaaccgatcaggcggcgcttgccattcatcttcaaatagcgtgcagcccacacggtgggggagccgacgtcagcagtgaagatcgcgtcgtcatccgccaactcgctgagcaagcgtgccacgtattgcggatggatcggtcgattggcctttgacggctgagccaggtcatccagcccttggcgggctttttcataatgcttcaaggacgtgtcgagaaagctgcgatcggtcttgcgcgttaaccgtggcagcagcgcactgatggtttcgctgacgtcagcggcgatgcccaagtccagcgtggcacggcgaccgagcgcttgggggttgcggtcgacctggatgatcttggcgtcggtggggtaaaactggcggtaagggaaatcggtgccgagcatgatcagcgtgtcgcagtcgagcatggcgtgataaccggagctgaaaccgatcaggccggtcatgcctacgtcgaacgggttatcccactccacatgctccttgccacgcagggcgtgcaccacgggagcgcccagtgcgtcggcgagggcgaccacttgatcatgggtgccggcgcacccgctgccgcacagcagggtaaccttgcggctgctttccaggatatcggtgaggcgttgcaggtcctgttccgccggcagtgtgcgcggtgcatgcagggcgggccacggcttgagtttgtcctcgacctccagcagcgatacatcgcccggtattaccaccacggccacgccgcgattgaggatcgccgagcgcatggcgcgatgcagcacctggggcatctgttcggggttggtgaccagttcgataaagtggctgcactccttgaacagttcttgcggatgggtttcctggaagtagttcaggccaatctctgaggatggaatttgtgcggcaatcgccagtaccggcacatggttgcgatggcaatcgaacagcccgttgatcaaatgcaggttgcccggcccgcaactgccggcgcacaccgtcagctcgccagtagccgccgcttcggcaccggcagcaaaagccgccacttcctcgtgacgcacgtgcatccactcgatgctgtccatggtgcgcagcgcgtcggtgaggccgttgaggctgtcgccggtcaggccccagatgcgcttgatgcccgcctgttcaagggtggtcgccaactgttgggccaggttgattttcgccatgaagaactccaatcgtcagtgaggttaaaaactgctgatcaataggggacagttcgatcacggcgaatgctccgcctttaatgtgaagattgcgtcatggctgcacggtattgccgggtgcgtcgggccagaaaccattggtcacgcaccagcgccatgcagggcgcgacgttggtcttgggcaaatggccgcggctgaggcggcgcatctggtagcgcaccacggcgagaatggccagggaggccaggggcttgcgcttccagtcgatgggtttgagttgcgggttggggtcgcggccttcgcgccagtgctggatcagttgtggctccagcgtcagggcggtggcgataccggccatggcgatgccgctgtcgagcacttgttgcacgatgggcaggcgacggatgccgccggtgaccattactggcatctgggcaatggccgcgacttcgctggcgaattcaagaaaatacgcctcacgggccagggtccggccgtcgcgtgcttcgccttgcatggccggtgcttcatagctgccgccggacaattccagcaggtcgatggacagcggattgagcatctcgaccacggcgcgtgcatccgcttcttcgaacccaccacgctggaaatcagcggagttgagtttgaccgacacacaaaacgacgggctgacacaggcacgcaccgcacggatcacgtccagtagcaggcgtgcacggttctccagtgaaccgccccagcgatccgtacgttggttgctcaatggcgacaggaactggctaagcaagtagccatgcgcaccgtggatctgcacgccggtgaagccggctttttcggccaggcgtgcgctggtggcgaagcgctggatcacgtcctggatgtcggcctcggtcatggccttgggcgtggcaaacatcttcgagaaaccgcccaggtcgagcgccacggcggacggtgcaatggcctgctggcgcaggttggcgggtgtctggcgtcctgggtggctgagttgcacccagaagtgcacgttcttgcgccgcgccacgtctgcccattcgcgaaagcgctgcagttgctgctcgtcctcaagggcgacgccgccggggccggtcatggcgcggcggtcgaccatcacgttgccgctgatcaacaggcccggctcgccatcggcccaggccgcgtagagctgcatcaactcaggggacggcgcttgccgggcatccgccatgttctcttccatcgccgccttggcgatacggttggaaaggacttggccattgggcagttgcagggcttcaaagggtgacatgggttgactcctgagcgggggaggcctcaggctaagcttaaaggtaactttaaggtcaagcaggcattcgatgaatattggcgaactggcaaaacagagtgggctggcggcgtcgcgtatccggttctatgagtcgcaaggcctgatcagtcaggtcgggcgccaggccaacggctatcgacgctatgcaccggaagcactgcagaccctgcaactgatccagagcgcgcagcaggccgggttcaccttgcaggagctcaaggcgctgatgcccgcgccaggggagcacaagcgtgaggagctgatcgaagcactggaacgcaaggtgatgcagatcgaagaaatgcaggcacaactggcccacagcaaggcgcaactactgggtgtgctcgaggcggtgcgagcgcagccggaaggggtgccgtgttcgatggggcagaagcaggtgctggcgtcgatcaagaccgatgatctacagagcaagtagatgccaatgtgggagggggcttgcccccgatagcagagggccagtcaacagattcattgactgatccaccgccatcgggggcaagccccctcccacatttgaggctcagcgccggcggaacaacggcagtggctcatccgttgccgcctggtacgtcaccgagaagtcctggagactttccagtgcttcgtacgggtctttgtccgcgcgcagggcgaaagcatcgaagccgcagcggcgcaggtagaacagctggtcgcgcagcacgtcgccgatcgcacgcaactcacccttgtaaccgtagcggtcacgcagcaggcgcgcgttggagtagttgcgaccgtcggtgaaggccgggaagttcagggcgatgacctggaagtgctccacgtcatcaccgatttcctcggcttcttcatcggcgtccagccacacgcccaggccgccgtcgcgggccttgagggcatggccgtgttcgcgccacagggccaacggcacgatcaggtcgtcgcagttggagatgccgtcgaagctcgcgtccttgggcagcaggtgccaggtttcgtcgaggacttcgttgttcttaatgattcgctgcatagacgcgctccttgaacaggtcgatgccgatgcgctggtaggtgtcgatgaaacgctcatcttcggtgcgctgttcgatgtacacgtcgatcagcttgccgatcacctcgggcatggcttcctgggcgaaggatgggccgaggatcttgcccaagctcgcatcgcggctggcgctgccacccagggacacttggtagaattcttcgcctttcttgtccacgcccaggatgccgatgtggccgacgtggtggtgaccacaggcgttcatgcaaccggagatgttcaggtccagctcgccgatgtcgaacaggtagtccaagtcgtcgaaacggcgctggatcgattcggcgatcgggatcgacttggcgttggccagggagcagaaatcgccgcccgggcagcagatgatgtcggtcaacaggccgatgttcggcgtggcgaaaccaccttcgcgcagctcgccccacagggtgaacaactggctctgctcaacgtccgcgagaatgatgttctgctcgtgggaggtgcgcagttggccgaagctgtagcgctcggccaggtcggcgacggcgtccagctgcttgtcggtgatatcgcccggcgcgacgccggtaggtttcaacgacagggtcaccgccacatagcccggcttcttgtgcgccagggtattgcgcacacgccagcgggcaaaacctggatgttctttgtccagtgctgcgagctcggcgtcctgattgctcagagccttgtactctgggtcgacgaagtgcttggctacgcggtgcacttcggcttcggtcagggtcgtctggccaccgcgcaggtgttccatctcggcgtcgactttctgggcgaagacttcaggggtcagggccttgaccaggatcttgatccgggccttgtacttgttgtcgcgccggccgtagcggttgtagacccgcaggatcgcgtcgaggtagctcaacaggtcctgccacggcaggaactcattgataaaggcgccgaccaccggggtacggcccaggccgccacccaccaggacacggaagcccagctcgcctgccgcgttgtgcaccggctccaggccgatatcgtgcacttcgatggccgcacggtccgaggtcgagccattgatggcgatcttgaacttgcgcggcaggtaggcgaattcggggtggaaggtggtccactgacggacgatttcacaccacgggcgtgggtcgatcagctcgtcggcggccaccccggcgaattggtcggtggtcacgttgcgcaggcagttaccactggtctgaatggcgtgcatctgcacggtagccagttcagccaggatgtccggcacgtcttccagcgccggccagttgaactgtacgttctggcgggtactgatgtgggcgtagcctttgtcgaagtcacgggcaatcttggccatcatgcgcgtctggcgcgatgtcagctggccgtagggcacggccacccgcagcatcggcgcaaagcgctgaacataaaggccattttgcaggcgcagagggcggaactcttcttcgctcagttcacctgccagatagcgtcgggtctgatcacggaactgcttgacgcggtcctcgatgatgcgctgatcgtattcgtcgtatacgtacatataggtcctgttctcggcaaatctgcgcgcacggccgcgcactcccaacggagccggcgcacgataccagtttgcgtttatgcgcaaaagtgatgtttgagtatatgcaaataaccaaattgactaatgagaaccgttatcgccatacccacatttgtcatgcgggcaatcgtcgactttactgtgagcgtgtttgagcgtattcaccgataaaaccgataagaggcgatgcgatgagcaatccgacaaaagcccgtaagcccgacagtaccgtggacgcctgggccattctgtttctgatcatcctggtggtgggaaccgccgtattctgggtgagccaccagtaaagagcctcgattgactgccgtgttgccactatcatggcggtcactattccaggctcgaaaaaccatgtcgaaggtgctgattgcgtgtgtgtggttgctgggaacggcgtatggggccatggcccatgccacgtcggtggtgtttctcaacccgggcatgtcgacggaaaccttctgggtcagctacgcgcaattcatgcaggccggtgccaaggacctcggcctgcatttgcgtgtgcgctattcagagcgggatgccaacaacacgctgatgcaggcgcgtgaggcattgcacggcagcgagcgaccggattatctggtgctggtgaacgagcaatacgtcgccccgcagatcctgcgcatggcccagggcagcggcgtgaagctgctgattgtgaacaacgcgctgaccgccgatcaggtgcgcttgcttggcaatggcgacggttgggttgccagcatggtcgctgatgatgaacaggccggctacctgatgctcaccgatctactacgccagcacggtaccgttgctgctggccaatccatcgaactgctggcgttctccggcaccaagaccaccccggctgcgcagttgcgcgaacagggcctgcgccgcgccttggccgaacaccccgaggtgcgcctgcgccagttggtctacggcgaatggagccgccagcgcgcctacgaacaagccacgctgctgttcaagcgctacccgcaggctgcgctggtgtggtcggccaacgatgagatggcgctgggggccatgcgggcattgcaggacagcgggcgtgtgccgggcagggatgtgttgttcggtgcggcgaacagctcgccggatatcctgcgggcgcggcttgacggtcgcttgagtacgctggtcgcggggcatttcaccctgggcggttgggcgatggtattgatcaacgatgatgcccagggtgtggatatcgacgcccatggcgggcgtgaccggcaggaggcgttattccaactgatcgatacgacccaggcacaacgcctgctcggccccatggcgccggtggatttccgcgcactgtcagccgtcggcaagccggcgtcctaccgatacccctttagcttgcaactgctgctgcgctagacgcccgccaggtgcagcaccagcttgacgataccgaacagcgtcaacgcaaacacagccgtgaacagaatgcccagcaccacaaaatggctgggcttgccgtgggtgaagtcgcgggcgcggttcttgccgctctgcacgccaaacgcggccgccaccacgctgtgcagcatctgccagaaggtagggggcttgttgttgactggatcgtccatacatccctcgacacaaggtgtgtgagggagagcatagacaatccagcggggcttagttgtcgtaacccaggttcggcgccaaccagcgctcggtcacgctcaggtcctggcctttacgcgccgtgtagctggtcacctggtccttgtcgaccttgcccacggcaaagtactgcgcctgcgggtgggcgaagtaccagccgctcaccgcagccgccgggaacatcgcgtagtgttcggtgaggaacacgccgctgcgaccggcctgcatctcgcgggcctcggggtcgagcagttggaacagttgggccttttcggtgtgatccgggcacgccgggtagccgggggcagggcggatgccgctgtattgctccttgatcagcgcctcgttgtccagttgctcgtccttggcataaccccagtgctctttacgcacctgctggtgcagccattcggcgcaagcctcggccaggcggtcggccagggccttgaccatgatcgagttgtagtcgtctcccgcgtcttgatacgccttggcgacttcttcggcgccgatgccggcggtggtgatgaagccaccgatgtagtcggtcacgccgctgtccttgggcgccacgaagtcggccagggagaagttcggcttgccgtcggtcttgatgatctgctggcgcaggtggtgcaaccgggcaatcggctggccgtcatcgccgtagacttccaggtcatcgtcctgcacctggttggtcggccagaagccgaacaccgctcgggcgctgatgagtttttcgtcgatcagcttcttgagcatttcctgggcatcggcgtacagcgcagtggcggcctcaccgaccacttcatcgtcgaggatgcgcgggaacttgccggccaggtcccaagagataaagaacggtgtccagtcgatgtactcggccagcaccttgaggtcgatattgtccagcaccttggcgccggtaaaggtcggcaccactggcgtgtagctgctccagtcgaactgcggcttcttggcgatggcggccgggtagctcaggcgttcggtgcgggcgctacggttggaggtgcgttcgcgcacttccacgtactcttcgcgggtacgctcgacaaagccggccttgagttccttggacaacagctgcgtggccacgccgaccgcacgcgaagcgtcggtcacgtacaccaccgcatcattgctgtacttgggctcgatcttcactgccgtgtgcgccttggaggtggtcgcaccgccgatcatcagcggcaggtggaagtcctggcgctgcatttcgcgggcgacgtgcaccatctcgtccagggacggggtgatcaggccggacagcccgataatgtcgcacttctgctccttggccacctgcaggatcttctccgccggcaccatcacgccgaggtcgacgatgtcatagccgttgcagcccagcaccacgccgacgatgttcttgccgatgtcatgcacgtcgcccttcaccgtggccatcaggatcttgcccttggcttccggcttgtcgcctttttccagctcgatgaacgggatcaagtgggccacggcctgcttcatcacccgggcggacttcaccacttggggcaggaacattttgccggcgccgaacaggtcgccgacgatgttcatgccggacatcagcgggccttcgatcacttcgatcgggcgcgcgaacgacagccgggactcttcggtgtcttcaacgatatgcgtggtgatgcccttgaccagggcgtgctccaggcgcttgttcacatcccagccacgccattcttcggtctcggcttccttgacgctgccgtcgcccttgtacttgtcggcgatggcgaggagggcgtcggtgccgtccggcgtgcggttgagcaccacgtcttccacggcgtcgcgcagttctaccgggatctggtcgtagatctccagttggccggcgttgacgatgcccatggtcaggccgttgcggatcgcatacagcaagaacaccgagtggatcgcctcgcgcaccgggttgttgccacggaacgagaacgacacgttggacacgccgccggaggtcagcgcgtagggcagttcgtcacggatataggcgcaggcgttgatgaagtcgacggcgtagttgttgtgctcttcgataccggtggcgaccgcgaagatgttcgggtcgaaaatgatgtcttccggtgggaagccgacttcattcaccaggatgtcgtaggaacgcttgcagatctctttcttgcgcgcttcggtgtcggcctggccggcttcgtcgaaggccatcaccaccacggcggcgccgtagcgcttgcacagcttggcgtggtggatgaactgctcgacgccttccttcatgctgatggagttgacgatgcccttgccctggatgcacttgaggccagcctcgatcacgtcccacttggaggagtcgatcatgatcggcacgcgggagatgtccggctcgccggcaatcaggttgaggaaggtcaccatggccttcttcgaatcgagcatgccctcgtccatgttgatgtcgatcacctgggcgccggcttccacctgttgcagggcgacttcgagggcttcggtgtagttgtcttcacggatcaggcgggcgaatttggcggagccggtgatgttggtgcgttcgccgacgttgacgaacagcgaactgcgatcaatcgtgaacggctccaggcccgacaggcggcacgccttggggatgtccgggatcacgcgtggcgcgtaaccggccacggccttggcgatggcctcgatatggcctggcgtggtgccgcagcagccgccgacaatattgaggaagccgctctgggcgaactcttcgatgaccttggcggtttccgaaggcagttcgtcgtactcgccgaattcgttgggcaggccggcgttggggtgcgcggacacgtgggtgttggccttgttcgacaactcttccaggtacggacgcagttcgctggcgcccagggcgcagttcaggcccactgaaatcggcttggcgtgggcgaccgagttccagaacgcttcggtggtctggcccgacagggtgcgaccggaggcgtcggtgatggtgccggagatcatgatcggcagttcggtattgagctcctcgaacacaccttgcacggcgaaaatcgcggccttggcgttgagggtgtcgaagatggtctcgatcaggatcaggtcggcaccgccttcgatcaggcctttggtggcctcggtgtagttttccaccagttcatcgaaggtcacgttgcggtagccggggttgttcacgtccggcgacaacgagcaggtccggctggtcgggccgagcacgccggcgacgaagcgtggcttggccgggttctccagggtcttggcgtcggcgatcttgcgcgccaggcgtgcaccttccacgttcagctcgtaggccagttcttccatgccgtagtcggccatggagatgcgggtggcattgaaggtgttggtttcgaggatgtcggcaccggcatccaggtaggctttttcaatgccgccgatcacgtccgggcgggtgatcaccagcaggtcgttgttacccttgacgtcgctcggccagtcggcgaagcgtttgccacggtagtcgtgttcttccagtttgtagctctggatcatcgtgcccataccgccgtcgaggatcaggatacgttccttgagggcttgatgaagggcttgcagacgaacgctacgatcggacatgggactactctggtcaggcattacggagggcgtggatcataacaaacctgtgcggctttgcagcatgcccggtttttacatgaatatcgctcatgttgcaggggcgcatggcccggtagaatcatcggcaatttttcagcgcacgcattgaatcgggaccggatacatgtcacttcgcctcatcaccagcgccgtcctggcactggttgcctgcatcgctcaggccgacggatccgccccggcgatttcctacacccgcgacattcaaacgatcttcaccgagaaatgtgtggcctgccacgcctgctacgactccgcctgccagctcaacctgggcagtgccgagggcgcggcgcgcggcgcgagcaaagtgccggtctacgatggcgaacgcagccaggccgcgccgaccacccgcttgttctatgacgcctttggcaaacaggcctggcagcagaagggcttctattcagtgctggacgcccagggcagccaggccgcgctgatggcgcgcatgctggagctgggccataacgcgccgttgcaacccaacgccaagctgcccgaagacattgtgctgggcctgaaccgcgagaacatgtgcgccatgcccggcgagttcaacgcctacgccggtgcccaccccagggaaggcatgccgctggcggtcaccggcctgaccgaccagcagtaccagaccctgcaacgctggctggcgtccggcgcgccaattgatgagcaaggcctcgcgcccagcgcgaaagaagccctgcaagtgcagcagtgggaaaacctgttcaaccagcccggcgcccgcgaaagcctggtggcgcgctggttgttcgagcatttgttcctcgcccacatctatttcgagaatggcgagccggggcatttcttccagtgggtgcgttcgcgtacgccgagtggccagcccatcgacctgattgccacgcgccgtcccaatgatgaccccggcacccgcgtgtattaccgcctgtggccggtgcagggcgtgattgtgcataaaacccacatcacctacccgttcagtgccgagaagatggcccgcatcaaagagttgttctacgccggcaactggcaggtcaacgccttgccgggctacggtccgggccgccgcgccaaccctttcgaaaccttcgaagccatcccggccaaggcgcgctaccagttcatgctggataatgccgagtatttcgtgcgtacctttatccgtgggccggtgtgccgtgggcagattgccacggacgtgatccgcgacaatttctggaccctgttccaggacccggaccacgatctgtacatcaccgatgcacgttatcgcggccaggccacgccgctgctggccatgccggggcagaacgatgacgtgggcagcgtgctcagcctgtggctggcctaccgcgataaacgcaacgaatacgaagccctgcgccgtgacagctacgctgacctgccgccgccaagctggtcgagcctgtgggcgggcaatgacaatgccttgctgagcattttccgtcacttcgacagcgcatcggtcagcaaaggcctgatcggtgaagtgccgcagacgatgtggctgttcgactatccactgctggagcgcacctattaccaactggcggtgaactttgatgtgttcggcaatgtgtcgcaccaggcccagacccggctgtacttcgacctgattcgcaatggtgccgagcagaacttcctgcgattgatgccggccgattcgcgcgatgatttcctcgacgattggtaccagaacagcggcaagctcaagctgtggctggattacgaggccattgatgacgacaaacccaccggcctgcacctgaacgaaaaggatccgaagcgcgactttgccaaccagttgctcacccgttacggcgatttgaatgccagcccggacccgatcaaccgttgcagcggcgcctattgctcccgcgatgggatcgacccggccttgcaggatgcggagcaggcactgagccgcctgacctcacgcccagctgccgggctcaaggtgattgatcaattgcctgaagcgacgatgctgcgggttgaaaccgccagtggcaagcgtgtggtctatagcctgctgcgcaatcgtgctcacagtaatgtcgcgtttctgctgggcgaggcttatcgctatcagccggggctggatacgctgacgatttatccgggtgtgctgagcagctacccgaactttatgttcaacataccggcacaggaagtgccggagtttgtggcggaaatggagcaggccaaggatgccaagggtttcgagaagattgtggatcggtggggggtgcggcgcagtcatccactgttctggcagtatttccatgatttgtcgcagtacattcgtgagactacgccggtggaagagggcgtattggacatgaaccgctatgagaacctataactaatggcagtgatccagtcatctctctgagcgggtgctgaagcggtcggatatctatcttacgggattgcaaaggaagctccgactatgttgatttcagtgcaggcgctaagagcgttggctgcgtgggtggtggttggacatcacttcattcaggtgtttttcaactttgaagtggatacgcctatggcgtatctgttcgccgacaaaggcgccgttggtgtagacgtgttctttgtgatcagcggcctggtgattttcctggcgaccgccgacaaggcactgaccccctggcgtttcatcctcatgcgtttggcaaggatcacgccagcgtactggttctataccctgctcatggctttgttgctgttggctgtgccgtcgctgtttgcagaaacccacctcgagacgagtcatctgcttctgtcgctgctgttcattcctgctcagaacccaggggggtttggcgtctatccgctggtggacgtcgggtggaccctgaatttcgagatgctgttctatctactgttcgcctttgccttgctagtgcggcggtcatatcggttatgggtagtggcagcgctgctgtacttggcgtgttacctcatcacgccggccttgaattgggccgacggcttttaccggaatgacatcgtcttcgaattcctgatgggcatcatgatcggcatgctctactgctgcggggcgtgccggaccccaccatggctgccggtgctgggtatcgtggtggcctcagcggcgatttatcacggggcggatttgcctcgtgcgctggagtggggagtgcccagcgcggtattggtcatcagttttgtggcgttggaaccatactttcacggatcacgattgttgaagctgctgggtgactgctcttactcggtgtatttgctccacacgatggtgctgtgcgtcgggcgatggttcgctgagcgcaacggaattgatccctatgcgatgttgcccgtttgcctcgtgatgacagcagtgtgtgcatttttcagctaccaatggctggagaaaagcacctatctctggcttaagcgttggtttggcatggaggatccggcaatcctttcccgacaaaaatactaggactttgtacctgcgtaatattttggcgtaaactgccggcaagcctgtgaggagtttccatgactgccataaccattaccgacgccgcccacgattacctggccgacctgctgtccaagcagaacaccccgggtatcggtatacgcgtctttatcacccagcccggcacccagtatgccgagacttgcattgcctactgcaagcccggcgaagagaagcctgaagacaccgccctggggctgaaaagcttcaccgcgtacatcgacgccttcagcgaagccttcctggatgacgccgtggtcgattacgccaccgatcgcatgggcggccaattgaccatcaaggcgccgaacgccaaggtgccgaacgtcaacgccgacagcccggtcaacgagcgtatcaactactacctgcagaccgagatcaacccgggtctggccagccacggcggccaggtcagcctgatcgacgtggttgaagacggcatcgccgtgctcaagttcggtggcggctgccagggttgtggccaggcggacgtgaccttgcgtgagggcatcgagcgcaccctgctcgagcgtattccggagctcaagggcgtacgtgacgtgaccgaccatacgcagaaagaaaacgcctactactgagtaaggcgttcactgcggacaaaaaaacggcgccccgtgagcgccgttttttatgctttaaattcagtaagttgcaccatttatctaatgtagagtgttcgtcgcgaaaacggcagtccgattttttgtgaatgaatttattaaataaaatcagtagtttatgtttgtcttgtgatgttgagcatcaaggtcgatacagatgcgcatgccccgcccgatacaacgatgactcactgaaactatcactcgccaacacccgacccaccacaatcaacgccgtacgccgaaaccccttggccgctactttttcggcaatgtcgctgagagttccaacaacccaatcctgatccggccacgtcgcccggtgcaccacggtaatcggacaatccgccccgtagtgcggcaccagttcggcgacgatcttgtccaggtggttgacccccagatggatcgccatggtggtgccatgtcgtgccaggctgtcgaagtcctcaccggccggcatgctggttttatccgcatagcgggtcagaatcacgctctgggcgatgtcgggcagggtcagctcggtttccagcagggccgcgcaggcggccaccgccgtgacgccaggaatgatctggaacgggatgcccagctcgcgcaaatggcggatctgctcgccaatcgcgccatacaggctggggtcgccggaatgcacgcgcgccacatcctggcccttggcatgggcggccctgatcaggtcgatgatctgttccaggtgcaattcggcgctgttgaccactgtttccgcctgatgaccttccagtaccgccgccggcaccagcgagccggcatagatgatcgcctggcaactgcggatcagccgctggcccttgacggtgatcaattccgggtcgccggggcctgcgccgatgaagtaaacggtcatgggaaatcctgatgaaaaacgggtgagcatgaaatctgctcatgatcggaagcggcgattatcgggttttcagtcggcgcacgccaatgcaaaggtggcctgggcggttttctggcgggtgatcagcaggcgcgcaggggcgttggcgaggtgttcggccagggccagggcggcgctttcggcgatgccgtaacagccggtgtgggcaaaagccacgtccgattgatggctcaagcggtctgcataaatcgccagttgttcagcgttgaagcactgcaacggcagattcagcagcgcggccaaggccagcagcccgggttcttcctgtttgtgatcgatgctggccagcgcactgacgcggtggcgctcgataccgccctcgatgagggcagcatcaaacagggccagcagggtgtgaacatcacaaccccgctggcagcccatgccgactaccagtttcacgccgagtattgatcgtcacggttgcggcggaacagccaggcgctgatcaggcccaaggccagccagaacgccacgttggtcaactgtgatgcgatcttgaactgcgcttccagcgcctccgggaccagcatcgaatgcacttccggttgtggcgcgccgatcacgtgcggcactacgaggatcgcggcgcccagcgccttgagcagccagttgcgaccgaacacgatcagtgcgataccggctgcggtagacgcggcagtaccgatccaccagatctgccgttgtgccaggtcagcggcggcggtgcccggcagttcgggcggcaggcccagggtcggcgccaatacaaaggtcgcataacccgccaggccccagagcaagccttgagaggtacgggtcggtgcacgcagggtgtacagaccggccagcatcaacgcgaagccaacggcgaccaccaggttgccgcctgtggtggacagcacgcgctgccagccgtcttccggctcccaggcttcggcgtcgtgggtgtgagcagccgcaccttcggcgtgctcgtgcaactcggtcgctgccggggctttttcaaaggtttccgcctgcagaatcagcggggcgacccagaagctttgcagcagggtcagcagcagggcagccagaaggccggtgaaacctgcggtttgcgcaatacgcttgatcatgtcggcaggtctcagtggcacgggaacgcggcgctgtggcgggtatcgtgggcagcgttgtgtactgcctcgatgtgcgagaaaccggcgaagtacaccaggcacgcaccgaggatcgacgcaccgatggcggcggtcaggcgttggctcagggtagaggtgctgctggcggagtgcgaagtgctgctgatgatcgacatggcgcgtccctttcaggtgtcagggtgaaacgagcgcatgaaaaccccgcgagccaggcacgcagggttctgaacagcgcccgcccaccgcgggtttgttatctgattttttcgggccggtctccgggcttgcgaggggctcaatgcctgaaaacgtcgccttcccatgccgcctggcacagtggatatgacgtttcgctcgcttaccgttgcgggggcagcaccggactgtcatgtgtgtgcatgagtcaccggtttcccgtttcaccctttgcagggcacccgaaacaagatgtgtaggagagcatgggggtgggaggggagtcaattggggatgtgttttctgggggcatatccgttgctgcggtaacggcggcttagggttccgcccttacggcggcccacgtattcaagcctgcgttcggccagcgtgtttgacggggcgaccccagatcaaaagcaagagcgcggcggccttagagccgaccggattgtatggctggtactcggtcaaagtgtgggagggggcttgcccccaatggcagtgggtcagtcactgatgagttggctgatacaccgccatcgggggcaagccccctcccacagtttgatcttcatgtatcagttgaagggtggtttgctctggctctagatctgcttttgattttgatctagggcggccccccaaatcactgtcggattacgggcataccgagcctaggcgaggtaccgagtgttggggtaagagcgttttgcttacttttgactgggccggcattccggcttttcaaaagtgagccgctgtaagagcggaaccaatagcggccgttaccgcagcaacggatatgtacacaggccaaccaaccccatcattgaccatcccccaagcactgcgtagccttgcaccctcgaggttcttcggcccaggccgaagctaagaagggaacgcggtccaagccgcggctgcccccgcaactgtaaagggtccagctgactgccacgccactgccgacaaggcgggaaggcgcagccagcgccggtcgcaagaccggcaagccccaagccaggagacctgcctcgcaaccgattttctacttcaaccgggcggggtgatccggtgacgaaatccgctgctgcgcaccgtcgcagggccatcgtcccgtatgcccgcccccaagggcatccgatgaaaacactggccaaactccccgtcaccatcgtcactggcttcctcggctcgggcaagaccaccttgctgcgccatatgctcgacaacgcccagggccgtcgcatcgcggtgatcgtcaatgaattcggcgagctgggcattgacggtgaaatcctcaagcagtgctccatcggctgcaccgaggaagaagccaacggtcgtgtctacgaattggccaatggctgcctgtgctgcaccgtgcaggaagaattcttcccggtaatgcgcgaattggtcgcccgtcgcggcgatctcgaccatatcctcattgaaacgtccggcctggcattgcccaagccgttggtacaagccttccagtggccggaaatccgcagcgcctgcaccgttgacgctgtgatcaccgtggtcgacagcccggctgtggccgccggtaccttcgccgcattcccggaccaggtggacgcccagcgcaagctcgaccccaacctggaccacgaatcgccactgcacgagctgttcgccgaccaactggccagtgccgacctagtgatccttaacaagaccgacctgatcagcgccgaagacctggcccgcgtgcgcctggaagtcgccgaagagctgccgccggcggtgaagatcgtcgaagccagcagcggtcgcttgcccctggatgtactgatcggcctgggcgccggttccgaagagcacatcgacggccgccacagccaccacgatcaccaccacgaaggtgaagacgaccacgaccacgatgcctttgactcgatctccatcgacttgccgcaagccgatgaagcactgctgctcgatgccctgacgcaactggtggtgcaacacggcatcctgcgcgtcaaaggtttcgccgccatcccgaacaaaccgatgcgcctgctgatccagggtgtgggcacgcggttcgacaaacacttcgaccgtgcctggggcgctgaagaagcgcgcaccacgcgcctggtgctgatcggccaggaactggacgcggcgggcctcgaagcgcaactgcgcgccgccctcagcgtctgacccatgcacctgctcaggacccagcccggtggtttcgtctcggacgataatattgccgaccttggccaaagccccgctgacctggtgatcctgtgcagcggcgattccagcctggcgctgctggccgaagcggcccagcagttgcccgacgactacccaagcctgcgcctggccaacccgatgcaggtgcagaaccatgcctcggtcgacctgtacgttgatgaagtgctgcgccacgccaaggtcatcttgatttcgctgcatggcggtatcggttactggcgctacggcatcgagcgcctggtggaactggccgaacgcggtgtgcaactgatcctggtaccgggggatgatcgcccggacccggaactcagcgggctgagcaccgtcggtgccgaagaacgtgatcggctgtggcacttcctgcgtcagggcggcctgggcaatgccctggatttctatcgctgcctggccagcgcttacctgggtcgcgactatgcctggggcgagccgcaaaccctgccacgcacggcgatctatcatccgcagcatgccaacgcccgcctgaacgattggcaggcagactggaacgccgactggccggtggcggcggtgttgttctaccgctcccatttgcaggcggccaataccggttttatcgatgtgttttgccagcgtctgcaggcggcgggcctcaacccgttgcccatggcggtggccagtttgaaagaacccggctgcctggcggtggtcgaggacctgctggatgaggtcggcgcggcggtgatcttgaacaccaccggcttcgcccaatccagccccgaagcgccgcacctgcgcccgtttcgccgcaatatcccggtgatccaggccatttgtgcccaggataaccagcccggctgggaggccagcgagcagggccttggcccccgcgacctggcgatgcacatcgcgttgccggagttggacgggcgcatcatcagccgaccgatcagtttcaaggacctggcctggcgcagtgagcgcagccagtcggatgtggtgtgctaccgcgccgcgcccgaacgcatggattttgtcgctgagctggcgcggcgttgggtcgaattggcgcgagtgccgaatgcagagaaacgcattgcgctgatcctcgccaactacccgacccgcgacggtcgcattggcaacggcgtgggcctggatacaccggcggcggcgctgaatatcctgcgtgccctgaaaaccgaaggctatccgctgccggacttattgcccgacagcggcacggcgttgatccatgagttgctcggcggcgtcaccaatgacctggacagcctcgacctacgcccttgccatcaaagcctgggcctggacgagtacgagacgatgttccagcgcctgcccgaagccaatcgccaggcggtgctggaacgctggggcgcgccgcagaacgatccgatgtgccgcgacggtcgcctgatgatcgccggcctgcgcctgggcttgacgtttgtcggcatccagcccgcgcggggttaccaagtggacgccagcgccgtgtaccacgacccggacctggtaccgccccacgcttacctggcgttctacttctggctgcgccacacctacggcgcccacggcgtgatccatgtgggcaagcacggcaacctggagtggctgccgggcaagggcgtgggcctgtcggaaaactgctggcccgatgcgttgctggggccgctgccgaatatatatccgtttattgtcaatgacccgggcgagggcgcccaggccaagcggcgcacccaggcagtcatcatcgaccacctgatgccgccgctgacccgtgccgaaacctacggcccgctgcgtaacctggagctgctggcggacgaatattacgaagcgcagttgctcgatccgcgccgcgccctggagctgcagaaggacattctcaagctggtgcgcgaaacccgcatcgaccaggagcttgagctggagagcgacgccgatgctgccgtgtggttgccgcgcctggacacctacctgtgcgacttgaaggaatcgcagatccgcgacggcctgcatatttttggcgagtcacccgagggtcgcctgcgtatcgacaccttgctggcgctgctgcgcatcccgcgtggcgatggtcgaggcccgcagtcgagcttgctgcgcgtgttggccaaggccttcgagctgggcttcgacccgctggactgcgccctggccgaaccctggaccggacgccggccgctggtgctgcagaatatcgatgggcagttgtggcgcaccgccggtgatacccgcgagcgcctggagctgtacgccgcacgtttgatcgagcaagccctggaaggaccgcttgaacagctggaggaacccggctgggaagacgtgaaggccgtgatcgaaagcctgcgtattgtcgtggcgcctcggctggatgcctgtggcccggcggaaatgcgcggattgctggatgccttgagcggccgtttcgtgcccgctggccccagtggtgcgccgagtcgcgggcgtttggatgtgttgcccaccgggcgtaactttttcaccgtggatgtgcgcaacctgcccaccaccacggcctggcgcatcggtttccagtcggccaacctgattctggagcggcacctgcaagaccatggcgaccacctgcgccaactcggcctgtcggtatggggcaccgcgaccatgcgcaccggcggcgatgacatcgcccaggcgatggcgctgatgggcgtgcgtccggtgtgggcgacgggcagccagcgggtggatgactttgaaatcctgccgatcagcctgctcgaccgcccgcgggttgatgtgacgttgcgcgtgtccggtttcttccgggatgcctttgccaacctgatccgcctgttcgatgcggcggtgcaggcggtggctgcgctggacgaaccggacgatctgaaccccctggccgccaaggtgcgcagtgagcgtgaagcgttgctggcttcgggcctggacgcagaggccgcggcaaaacaggccggctggcgcatctttggtgccaagcccggcgcctacggtgcgggcgtgcagggcgcgatcgacgggcgtctctggcaaagccgtgaagacttggccgaggtttacctgaactggggcggctacgcctatggcggttccgacgaaggtactgccgcccgcgggcaattcgcccagcgcctgagccaggtgcaggccgttttgcagaaccaggacaaccgcgagcacgacctgctcgattccaacgattactaccaattccagggtggcatgctcgctgccgtggaaaccctgagcggcgacaaggccgccagctaccatggcgaccatagccagcctgacctgccgaagatccgcacgttgaaggaagagctgaaccgggtgatccgttcccgtgcagccaaccccaagtggatcgaaggcgtgaagcgccatggctataaaggtgcgtttgaaatggccgcgacggtggacaatctgttcgccttcgacgccaccaccgcactgatcgacgatcaccaatacgcactgttggccgacgcctacttgctcgaccccgacacccgggcctttgtgcaacagcacaaccccgatgcactgcgcgacatgaccgagcgcatgctggaagcccagcagcgtggcatgtggcaggaaccgggggcataccgcgaggcgttggaaaacctgttgctggatatagaagaagacagctgatgactgatattccccatttcccgctgtccgccgtggtcggcgccgatgacctgaaactggcgctgtgcctgaccgctatcgacccgaagattggcggtgtgctgatcgaaggcccgcgcggcatggccaagtccaccctggcgcggggtttggccgacctgctggccagtggtcagttcgtgaccttgccgttgggcgccactgaagagcgcctggtcggcacgctggacctggacgccgcattgggcgaaggccgggcccagttctcccctggcgtgttggccaaggctgacggcggcgtgctgtacgtcgatgaagtcaatttgctgcccgaccatctggtagacctgctgctggacgtggccgccagcggcaccaacctgatcgagcgcgacggcatttcccatcgccattcggcgcgcttcgtgctgatcggcaccatgaacccggaagagggcgagttgcgtccgcagttgctcgaccgcttcggtttcaacgtggccttgagcgggcagaccttgccggccgagcgtgggcagatcatccggcggcgtctggatttcgacagcgaccctgcggcgttctgcacgcagtgggaggtgtcacaagcggcattgcgcgagcgctgcacccaggcacgggcgcggctcgacagcattgcgctggatgaccaggcgctggcgcagatcaccgaacgctgctttgcggcgggggttgatggcctgcgtgcggaccttgtctggttgcgcggtgcgagggcccatgccgcgtggcggggagccagcgccatcgccgaggaagatattcaagcggttgccgaattcgccctgcgccatcgccgccaggaacagtccccaccggccagcccgccaagcgaagggcagtcgccgaaaccctccgacacctcgtccggtcaaggccaatggggcgatatgcccgcaccggcgctgcccacgggcgcacgccgggaagtgccgacctggccaaaaaagccctaggcattcgccctcgacctgacgcgggggcggatgcgcgacccaaggcagggcgactaggcaacggcaggcaaggcaaggcacgcaacgcgaagcagggcgcgatcaactggccgggcaccttgctcggtggtcggccacaaacgcgacaggacttgctgtttcacctgcgcagtcgtgcggcccatgaactgtggttggtgattgtcgatgcgtcggcgtccacccgacggcatcgagcactcaccgacgccaagggtttgttggcgcagttgtttgatgacgcctaccgccagcgggcacggatggcgttgttgacggccagcgggcaaatgccgaagtggcaggtgcaagggttgaaagcggccaagggcttggcgggttggctggaacagttgggcgcgggcggcggtacgccattgctggcggcgcttgtcgaggccggcaattggctggcattgcggcgcaagcgctacccggctgaacaacagcggttactggtgatcactgacgggcgactcaaggaagttactgggctaccgcagttggagtgcccgggcctgctggtcgatatcgagcgtgggccgatcaggttgggtcgcgcgcagcaactggcggcagggttgcagttggagtatcggcatatcgatcagctgtagtgcctgggcaactgctatcgggggcaagccccctcccacaggggaatgcatttcaaatgtgggagggggcttgcccccgatgaggccctgaaattcacgacaaaacctcagccagcccccggcacattcggccaaagattggccaccagaaacaaccgctcggcttcctcccaatcctcacccacctgtaccagccgcaccagcagttgcgccggagccatcgggtcaaggtcggccagccagccgtgcatctgctcttcgctccacacctcattcgcggggtaatgcgccggcgccagccaggcatgccggggcaggggctgccaatggcccggttggctgcggctgacaaacgcttgccagtcccgttgatgcaaccaacgcccgcgcaaatgctgcggatgggcgccactggggggcatggcctggccgggccaggggtagagcaggtaaccgcccaaccacaaatgcgcatcaaactgctggacatccaacgcggccagcacttcacggctttcctcccgcgcggatatcggcaattgatgttgggccagatgcgccaacttgcggtccagtcggtcatgacaacccggccccagccactgtgcggtgtcctgaccttcaccgtcctgcggccccagatacagcttgatcgccagttccaggtgatgcacgccatcgcggtcacgcagcagcatatccagctcgccgagggtatgcccggcacggcggatcggcaggttggcggccagcaattccacgcccggcgcatgttgcacggcgaactgccacaggcgttcgtaatacaggcccaggcggcgcgtgcgcgacaggctcaaccattgctgcaaggcgctgctgtcctggtccagctggcgcagccagcgttccaacagatgcggcgcctgcacccaatcgctgccggccagcgggtggcgttgcggccacggcgtctgcgcgagcatcggcggggcgagcatcacccacgccaggtcgcgcacctcggggtggcgcagctggcggggcaggttgtgcagatcggggaacacagtcatggtccgagcatagccttttaactgcgctgaaggtggctgagaaccgttgtcatcaaggcttcacggcgacaaaggattttgcctgagacggcctttcgcccataatcgttcttttttgccacactccacatcccgcaggagccccatggagcaatttcgcaatatcggcattatcggtcgcctgggcagtacccaggtgttggacaccgtccgccggctgaaaaaattcctgctggaccgccacctgcatgtgatcctcgaagacaccatcgctgaaatcctgccgggccatggcctgcagacctcgtcgcgcaagatgctcggcgaagtctgcgacatggtcatcgtggtcggcggcgacggcagcctgctcggcgcggcccgtgcgctggcgcggcataacgtgccggtgctggggatcaaccggggcagcctggggttcctcactgatatccgccccgatgagctggaagtcgaagtggccaaggtgctcgacggccattacctggtggagaaccgcttcctgttgcaagccgaagtacgccgccatggcgaggccatcggccagggcgatgcgctcaatgacgtggtgctgcaccccggcaagtcgacgcggatgatcgagtttgagctgtatatcgacggccagttcgtgtgcagccagaaggccgacggcctgatcgtcgccacgcccacgggttccaccgcctacgcgctgtcggcgggtggcccgatcatgcatcccaagctggatgccattgtgatcgtgccgatgtacccccatatgttgtcgagcaggccgattgtggtcgacggcaacagtgagctgaaaatcgtggtgtccaaagacatgcagatctacccgcaggtgtcgtgtgacgggcagaaccatttcacctgcgcccccggtgacaccatcaccgtgagcaagaaggcacagaagttgcggttgatccacccgctggaccacaactactacgaagtgtgccgcaccaagctgggctggggcagccgcttggggggtggaggcgactgatgctcgatcccgcgcgtagctacgacctgattggtgacgtgcacggttgcgcccacacccttgagcacttgctcgacctgttgggctaccacaagcagggcggcacctggcgccatcccacgcgtatggcggtgttcctcggcgatatcatcgaccgtggcccgcgcatccgcgaggcgctgcatatcgtccacgacatggccgaggccggccatgcgctgtgcatcatgggcaaccacgagttcaacgccctgggctggaccacaccggcaccgccgggcagtggcaagcagttcgtgcgcgagcacaacccacggcatgcgcggttgatccacgagaccctgacccagttcgaacatcacccggccgactggcacgacttcctcggctggttctacgacatgccgctgtttgtcgacgccgggcgttttcgcgtggtgcatgcgtgctgggacgatggctttatccagccgctgcgtgccaccttcccggacggctgcatcgaccagcacttcctgcaggccgcggccgtgccgggcagttttgcctgcaacgccttcgaccgcctgctgcgcggcaccgacatgcgtttgccggacggcctcacgttgaccggtggcgatggcctgacgcgctcgttcttccgcaccaagttctgggaagacgaccccaagacctacggcgatatcgtgttccagcctgacgcactgcccgagccggtggcgcgtacaccgttgtcgtccaccgaaaagaattccctgctgcgctacggcgtcgacgaaccgctgttgttcgtcgggcattactggcgcagcggcaaaccggcgccgatccgcccgaacctggcctgcctggactacagcgcggtgctgtacggcaagctggtggcgtaccgtctggaccaggaaacccgcctcgacccgcgcaagttcgtgtgggtcgatgtcgagcgaccggaggtgctcacatgagcccctgcgcgctgcacatgcactcttgaggaacctccatggatgattcgacgttcgaccaactggaggctgcgctggctgcggctcccggtaacgtcgcactgctgaccgtgttgctgggcgccagccttgagcgtggcgaacacgcgcgtgggctgaagctgctgcccgccgaccttgagcaatggccagaggcttcggcgctgaagctggcggcggcgcaattgctgctggccgacggccaggcgcagaaggcgttgttgttgatcgagggtgaagacccgacggcgcgcctgctcaaggcccgtgccctggctgcactcgagcgtctcaaggaagcccaggtggaataccgcgcagcggtggacgccaacccggcgctggaagacatggcgctgtggcgccgcctgaatgtgtcggtggtggacttccctggcgccgaaggccgcccgcgcctgcgtgtgatctccaatgacgacaccgacaagagcgaagtcgtgcgcctgctggtgccggaaaacgaaaccctgaccttcgatgatatcggcggcctggatgagttgaaaaagaccatccacaaaaagatcatcctgccgtaccagaaaccgggcctgttccagcgctttcgcaagaaagtcggcggcggggtgctgctgtatggaccaccgggttgcggcaagaccatgctcgcccgcgccacggccggggagtgcaaggccaccttctttaacgtggcgatttccgatgtgctggacatgtacatcggcgaatccgagcgcaagttgcacgcgctgttcgagcaggcacgggcccaggcgccggcggtgatgtttttcgatgaagtcgaggcgctgggcggcaaacgtgcgaatacccgcgagtcgacctcgtccaagctggtgagccagttcctctccgagatggacggttttaccaatgacaaccacggcgtgctgatcctcgccgcgaccaacgtgccctggtcggtcgactcggcgttccgccgccccggccgctttgaccgcgtgctgtttgtaccgccaccggatcgcccggcgcgtgaggcgatgctcaaggcgatgatgaaaggccgcccgatggcagacgacatcgacttcgccttcctggccaagaacacctcgggcttctccggtgccgacctcagcgagttggtggaaaccgccgccgatgaagccattgaagcgtccatcgacagtggcgccgagcagtcgatttgcgaccggcatttcaagcaagccttgaaagaggtgcgcgccaccaccctggaatggctgaccacggcgcgcaattacgcgcggtatgccaatgaaggcaaccagtacgatgaagtgctggctttcctcgacaagcacgggaagggtcgctgatggcgcagtacggtggttatcgcatcgaagacgaaccgcgcccgggcgctctggccaagtgggcggtttcgccattctggccgctgctcggcctgatgctcggtggcgcctggctgggtttgccgtggttcgtgttcaactccattgccgtcggcagcccgacgcgggtgcgcgaatgggtgctggccggcgtggcgctggtgggcagcatcgtcatcggcttcgtgttgctgcaactggttggcgcggggtatttgcagacccaggcgcaaatccagtacgccttgctggtgttggtggtgtggaaactcaccctgggctacctgctgtatatgcagcagaacgcaaccattgagatttaccagtactacggcggcgagttgagccgttttggttttcccttggcgttgattggtggcttcgtgctcaaaggcatggtcgtcaaatggctgccgtacaccctgtggtacctggtggtgagctgatgaataccgactatctgctgcaactggcttaccaacgcctacaggctgaccacaatgatggcgccatcgacgcactgcgccagttgctggccagcgacccgcactcggccgaggcgcatgccttgctggcgatctgcttgatgaatatgcgtcgcgtgcatgctgccaagcgcgaggtgcagttggcgcttgccgccgatgcgcagttgccgctgtcccactacgccgccgcgcaggtggcgattgccctgcgcaagttcaagctggcccaggaacatgtcacccagctgttggacatggagccgctgaacccggcgtactaccgttgccaggccgagttgtaccagctcaccggtcgcctagcgcaaagccgtgaaccgctggaaaaagccttgcaactgggccccgatgatcccgccaacctggtagccatggcgcagttccaccgcgccagcagccagtgggaccaggcgtatcagttcgcgcgccaggcgttgcaggctgatccgtcgaatgcggcggcagtggtggtgctcggccacctgttgttgcgcgaaggcgatatcaacggcgcccgtgaccatgcgatctgggccttgcaggagaacgccacgaacgttgcggcgctgcacctgctcacggcggtcaaggcccgcagcaatgtgttcctcggcacctggtggcgcttcaatagctggatgaacgagcgcagcgccacccgcgccattatcctgctgctgtgcatgtttgtggtctaccgtgttgtggttatcacgttgactgcccagggctatccgcaagtggccgagctgatcaattggctgtggctggcgtttgccgcctacaccttcgccgcgccgcagatcttccggcgccttttggacaaggagcttgtacaggtcaagctctccaaggaattctgacgggccaggacccgtcacccacgtactcgctgaacctcagaggctgttcacatgtcgtcttttgctgaaatgatcgaaaacatcaccccggacatctacgagagcctcaagctcgccgtggaaatcggcaagtggtccgatggccgcaagctcaccgccgagcagcgcgagctgtcgttgcaggcggtgatcgcctgggaaatccagaacctgccggaagaccagcgcaccggctacatgggcccgcaggaatgccagtcgaaatcgaccaccgtgccgaacatcctgttcaagtcggatgcgatccattgattgaaatcggtcgcggtgcagtcagcaagatgtcggcgcaactcggtgagccgaccgttcaatacgcgtttcgcttaggaagtgccgaggtgccggtcaatccgttgatcggcacccacgtgcgcctggaatacctcggtgccatccattgcagccattgcggccgcaagaccaagaccagcttcagccaggggtattgctacccgtgcatgacaaagctggcccagtgtgacctgtgcatcatgagccccgagcgttgccattacgacgccggcacctgccgcgatccaggctggggcgagaaattctgcatgaccgaccatgtggtgtacctggcgaactcgtcaggcatcaaggtcggcatcacccgtgccacccagttgccgacacgctggctcgaccagggcgcgagccaggcgctgccgatcatgcgcgtggctacccgccagcagtccggttttgtcgaagacctgttccgcagccaagtggccgacaagaccaactggcgtgcgctgctcaagggcgacgcccagtccgtcgacctcaagcaggtgcgtgaccatctgttcgccgcctgtgctgacggcctgctgggtttgcaggaacgctttggcctgcaggccatccaaccggtcaccgacatcgagccgctcgaaatccgctacccggtggagcagtatccggcgaagatcgtcagcttcaacctggacaagaacccgattgccgaaggcacgctgctggggatcaagggccagtacctgatcttcgataccggcgtgatcaatattcgtaagtacacggcctaccagctcgccgtgcatcagtagaaggatgccacccatgcgcaccgaacaaccgaagatgatttacctcaaggactatcaggcgccggactacctgatcgacgagacccacctgaccttcgagttgttcgaggaccacagcctggtccacgcgcaactggtgatgcgccgcaatcccgagcgcggcgccggtttgccgccgttggtgctggacggccagcagctggagctgttgagcgtgaacctggccgatcaggcactgagcgctgatgactacgagctgaccgacagccacctgacggtgcatccgcaaagcgcgacgtttaccctggataccacggtaaaaatccatccggaaaccaacactgccctggaaggcctgtacaagtccggcagcatgttctgcacccagtgcgaggccgagtgctttcgcaagatcacctattacctcgatcgcccggatgtgatgagcaccttcaccaccacggtgatcgccgagcagcaccgctacccgattctgctgtccaacggcaacccgatcgccagcggtccgggtgaggacggccgccattgggcaacctgggaagatccgttcaagaaaccggcttacctgttcgccctggtggccggcgacctgtggtgtgtcgaagataccttcaccaccatgaccgaccgcaccgtggcgctgcgcatctacgtcgagccggaaaacatcgacaagtgccagcacgccatgaccagcctgaaaaagtccatgcgctgggacgaagaaacctatggccgtgagtacgacctcgacatcttcatgatcgtcgcggtgaacgatttcaacatgggcgccatggaaaacaagggcctcaacatcttcaactccagcgccgtgctggcccgcgccgaaaccgccaccgacgccgcgcaccagcgggtcgaggcgatcgttgcccatgaatacttccacaactggtcgggcaaccgcgtgacctgccgcgactggttccagctgtcgctcaaggaaggcttcaccgtttaccgtgactcgcaattctccgccgacatgaactcggccacggtcaagcgtatccaggacgtggcgtacctgcgtacccatcagttcgccgaagacgccggtccgatggcccacgcggtgcgtccggacagctttatcgagatctccaacttctacaccctgaccgtgtacgaaaagggctcggaagtggttggcatgatccacaccttgctcggcgccgaaggcttccgcaaaggcagcgacctgtacttcgaacgccatgacggccaggccgtgacctgcgacgacttcatcaaggccatggaagacgccaacggcgccgacctgacccagttcaagcgctggtacagccaggccggtacgccgcgcctggcggtgagcgaggcctacgacgccgcggcgaaaacctacagcctgaccttccgccagagctgcccgcaaaccccggacaaggtggaaaaactgccgttcgtaattccggtggagctgggcttgctggacgggaagggcgctggcattgccttgcgcctggccggtgaggcggctgcgggtggcacgtcgcgggtgatttcggtgaccgaggccgagcagacgtttaccttcgtcgatgtgcctgagcagccattgccttcgctgctgcgcgggttctcggcgccggtgaagctgagcttcccgtacagccgcgaccagttgatgttcctgatgcagcacgacagcgacggtttcaaccgttgggatgccggccagcagttgtcggtgcaggtgttgcaggagcttattggccagcatcagcaaggccaggccttgaagatggatcagcgcttgatcactgcgctgcgcagcgtgttgagtgatgaaagcctagaccaggcgatggtggcggaaatgctgtcgttaccgggtgaagcctacctgactgaaatcagcgaagtggcggatgtggatgccatccacgccgcccgtgagtttgcgcgcaagcaactggcggacaacctgcacgaagcgttgtggctgcgttaccagtccaatcgcgagctgtccaaacaaacgccgtacgtggcggccgccgagcactttgcccgtcgcgcgttgcagaacatcgcgctgtcgtacctgatgctcagtggcaagccgcaagtgttggccgcgacgctggaccagttcgacaccagcgacaacatgaccgagcgcctgaccgcgctggcggtgctggtgaattcgccgttcgaggcagagaaggccaaggcgcttgcggtgtttgccgagaacttcaaggacaacccgctggtcatggaccagtggttcagcgtgcaggctggcagcacgttgccgggcgggctggcgcgggtcaaggcgttgatggagcacccggcgttcacactcaagaacccgaacaaggtgcgtgccttgatcggtgcctttgccgggcagaacctgatcaacttccacgcggcggatggctcgggctatcgtttcctggcggacttggtgatccagttgaatggcttcaacccgcagatcgcttcacgccagttggcgccgctgacccgctggcgtaaatacgacagcgcgcgccaggcgctgatgaaagccgaactggagcggattctggcgtccggtggtttgtcgagtgatgtgtttgaggtggtcagcaagagtcttgcctgagttgcatcgttgaataaaaaacggcctgttgaacaggccgttttttttgcctcagataaccggtggtcgcgcggtgtcgaggccgttatcgatggggaagcgctctgcgatgatcccgtgcggcacgccaagcgggatggcgctggcgctgtcgagacgggtgacgtgatcggccgacagttgcacattcaacgcgccaagggtgctgtccagctgggcgcgggtgcgcgaacccaggatcggcaccagcgcggtggtcgagcgccgggccttttcccgcagccaggcgatggcgacgtgggtcggcgtggcgtcgatttcaccagcgaccgccagcaacgcgtcgagcacggcggtttcacgcgcactgtgttcggcgtgcaccaggatcccgagtttgttggcgcggttgtcgtcctgggtgttgcggtacttgccggtcaggaaaccgccgcccaggggggaccacagcgtggcgcccagccccagcgcttcggccattggcagcaactcgcggtcggcgctgcgttccaccaggctgtattccacctggacgccgatgatcggtgcgaagctgcgcacgtcggccagcaggtcggcgcgggcaatgcgccaggcggggaagttggacaggccggcatagtggatcttgccggcgcgtaccaggtcatcgaggccgcgcaggatctcttccatgggcgtgacgttgtcgctcatatgtgcccagagcaggtcgatgcgctcggtgttcaggcgcttgaggctttcttccaccgagcgcatcaggttcttgcggttgttgccgacgcggatcgtgccttcatcggacggctcggtgcgcagggtgtacttggtggctaccaccaggttgtcacgttccgaggcgataaattcccccagcagcttttcggcctggccgaactggtaaccgttggcggtatcgaggaagttgcccccggcttcgaggtaaccatcaaagatcgccttggcttcgtcgcgctcggcgccatggccccaacccgtaccgaaattaccggtgcccaaggccagttcagatacctgcaggccgctgcggcggccaaagattttattacgcatacaaggactccagaggcagtgattgtcttacatgtttggtaacatgtatttaatatgatatgcataatttatcgggtcaagcgacttttttactgctgacgatttctgacagggggctttgctatgctgctgcacttttccattttctggcgggaaaccctgtgtcgcgtaccactcgtctactgactttgctccaggccctgcggggcaagaagcgtccggtgaccgctgccgtgctggcggcgcagttggaggtgtccgagcgcacgctgtatcgcgatatcgccgaattgacggccttgggcgcgccgatttttggtgaggcgggggtagggtatgtgttgcgcagtggcttgtttctgccgcccttgatgctgaacgccgaggaaaccgaagctatcgtgctcggcttgagatatgtggaccagcgcggcgatgacgtgctcagccgcgctgccgccaatgccctggcgaagatcgccgatgtactcgaccctgccgcccaggaagccttgcgcaacccgacgctgctgccggggccgcccggcttcggttacccggaaaaccgtgtgccgctcaacgtgtttcgcggggccattcgcaaccaggccaagctgcagatcgattacgccgacgccagccagacccagagccaacgcctgatctggcccctggccctgggctttctgaatgaagtacgggtgatcgtggcctggtgtgaattgcggggggcctatcgcacctttcgcaccgaccgcgtggcgagtgcacaggtgcttggcgaacgttacccggggcggcgcagcgattggctgcgggcctggcgcaagttgatggaacagaacgaatccgggccgtttactcctgacaaaaactgacacaaccctggcttagcatggcactacaaatcacccagaaaggagctgtgtcatgtctatccctgagttggcaccggccatcgtggcctatatcgcggcggccaatacccgtgacacctcggctatcgcccagtgttttgccgaggatgccaatgtgttcgatgagggccagcaccaggtcggcgctgccgccattgcgcgctggatggaagacaccgggcgtcgttaccagccgcgggtcgaagtgctcaaggtgcaacaccgtaccggcaaggtgctggtcagcaatatcgtgtccggcaatttcccgggcagcccattggagctgcgctacacctttcgcttgaacgagcagggcaagatttcgcggctggatatttcgctgtagttcatactggcgggcatgactttcgactcgcccctcgctgcctaccaatacgccgttgctcaaccgggtttcgtcgccgacgccgctcagcgccgcgcggtggacgccctgcaagcctgccacgaagccctgcaccacagccatgcaccgatcaccggcgtgtacctgtggggcccggtgggtcggggcaagacctggctgatggaccagttctaccaaagcctgcaggtgccagcgcggcgtcagcactttcatcacttcatgcagtgggtgcatcagcgcctgttccaactgaccggcacccacgaccccttgcaggccctggcccgggagctgagccaggcagtacgcgtgctgtgcttcgacgaattgttcgtcaatgacatcggtgacgcgattatcctcgggcggctgtttcaggtgatgttcgatgaaggcgtggtgatggtctgcacctccaaccaaccacctgaccagctgtatgccgagggtttcaaccgcgagcgatttttgccgggcattgcggcgatcaagcaacatatgcaggtggttgcggtggatgggggagaggatcaccggttgcatccgggcgcgggtattcagcgctactgggccaaccaacccgaggtactggcgggcgtgttccagcgcttggcccaaggtcaaccgactcgcagcgggccgctcgtggtggggcaccgcaccatcgtcgccgtgcagtccagcgacacggtgctctggtgtcgttacgccgacctgtgcgaacaaccgctggcggccatggacttcatgctgctgtgcgatcgcttcaaggcgatcctgctcggtgaagtccccaacctcagtgcgcaaaaacggcctggccggattgcccggggcactgaggatggcgtgcaacgtgtagtggccggtgatcgccaattgccggagttgtcggtgcacgatgacagcgtgcgtcggtttatcgccctggtggacgagtgctacgaccgtaaagtgccgttgttcatcgaggcccaggtgcctctggagcgactttataccgagggctacctggagtttcccttccgcaggacactcagccgcctgcaagaaatgcagttgcagcgtttcggctgacgcccgtacgaaaaaatccaggagtcggccggttgcgcgttttcaaccgagtaaccttcgcgctttcgtgcgcatatttgtagttaatctccttcatctggcgcctgctccacgcttacaatcgtgcccctcacagggagccgaatcccttgtaatcgtgatcgaggaaggacatggacaccccagacatcctggtgctgcaagccagctacaccaaccccgtgcatgccgacgccatcggccgcgtgctcaaccattacgccgaagacccgatgggcggtggccacagcctgcccgccgacctcctggagcaactgccaggcgagctggcaaagcggcctcatgcattcagcgtactggcgtttgtaggcggtgagccagcgggtctggtcaattgttttgaagggttttccacgtttgcctgccgtcctttggtcaacgtccacgacgtggcggtgatggaggcgttccgtggtttggggctgagccagaaaatgctgcaaaaggtcgaggaaattgcccgtcagcgtggctgctgcaagatcaccctggaggtgctcgagggtaatgccgtggctcaatcggcatatcgcaagtttggttttgatgattcgaagtttgacccggcccacgggcgcatgttgttctggagcaaaccgctttaataaataacaggcaaaaaaaggcgccattaaatggcgccaagttgaccttaaccaaaggagcgggatggcaaagggtattacggttacatcaagtgtttggttgttgctcggcagcggactggtcagcggtttctttcttcacgttctttccatcggcaagcgcggtttgtgcagcggtgccgtgggtttgttgctgcacgaaggtgaagtcgttgtagaacgccttggaacgctcggagccgccttcggcaaaggcggcggcggaggtcagggtcatcaggctggcaagcatcagggtggagagtttcatggcagtgtttccggtaagtgtgatcggtatccgctctgtccttgatcagattcatggggcgagtgtggagggagtttattaagtaggaattaacgccaaaaaaaccaaaagctaacaatttcgttaacttttggttaaaaggtcctacatcttccagtccaatgccaaggtgatcgagcgtgggtcaccccaatacacgccgttataaaaaccaacgcgctcgtaatactttttatcaaatagattgttgacgtttaacgacgccgtaacatgttcatcgaactgatagcgggacatcaggttgaccacgctgtaggcctgctgagtgatctttgcccgtgtggtgatccggttgcccttgctgtcacgagcccccgttggccggttgctgaattcgtagatatcgctctgccagttcacggcaccgccgaccgtcaggttgcgccatgcaccgggtaaacggtaggcactggagaccttcagcaggttcagcggctggccggtgttgttgcgtttgtgcgtgccattcactgagtgggtataggtgtagccggccgtgagattccagtccggcatcacttcgccggccacctccagctcgaaaccgctcaccttgttacccttgccgcctgacttgtagtactcctcgcccgttttggggttcggcagtacggagtagtcccgttcggcgacgttgtcctgcttgctccagaaataggcggccgctacgttcaagcgctcctgcagcaagctgcccttgagcccgacttcatagttgctgcccaccacgggctccaggtacttctcgttgacgtccttgaggctctgcggcttgaagatgtcggtgtagctggcgtagacggtgtactccggcgtgatgtcgtagagcagcccggcgtagggtgtccacatatcgttgtgggtctggcgggtcttgttggccctgagcaattggtcattggccgtgtattcaggcgccgcgctttccagctcccagctgccataacggctgccgagtaccgcatgcaggcgctcggtcaggctcaggcgcgtggccaggtagccagctttctgttgcttgctgctgtgctcacccttgagcccggtcacggtgtcggcgaacttgccgatcccgcccatgtatttccagtcttcgatgctgtagtagccgccggggatgctgctgcgcatcacgggcgagacgtcccgctgcgtggcctcgccataacccatcatcagttcatgttcacggcccagcagcgcatagctgccagccaggttcaggtcaatcgcctccattctcgacgtgccgcgcatatggctggcccaggcggtcatgccgctgcggtcgtcgttggggaaccccgcaccgccgtagtagaccttgccgtccgtgtcgctctggcgatgggtgtaggccgccttcaagtgccagtcgccattcaggcggtgatcgaggctggcaaaggtggtcttgtcggtcagcggccaggagctccagtgcgctgccatattggtggagcgcgacaacccagccttgccgccctggctgttccagtagggcacagtgccccaggatgtgccctgtacctttttgtcctggtaatcaaaaccgaccgccagcacggtgtcgtccgacaggtcgccttcaaggatgccgtagccgactgcccgctgcagcgcgtagttgtcacggaacgatttgctgtcgcgataggccagcactgtacgcccgcgcagcttgccgtcgtacgccaacgggccgccgacatccacgaagctgtagtagttgtcatggctgccaccgctcaccccggttttcgcctgccactgggcggtggggcgcttgcgcaccatattgaccgtggccgaggggtcacccgcaccagtggtcaagccggtagcgccgcgaaccacctcgatgcggtcgtagatgatggtgtcggaatcggacttcatgtagccgaaggtgttgagcatcccgtcaatctggaagttgttgatgccgtagccacgggaggaataggacacacggtcggagtcgttgtgctggacgttgaccccggtggtctggcgtagcacttcggtcaatgtattgagattgaaatcatccatctgctggcgagtgatcaccgagatcgattgtggggtttccttgaccgaaaggttcagccgtgtggccgtgctcatcgagccggtggtgtaggccccggtgtgctcggtggtggcgcccaggccctcggcggtgatgctggtggcccgcagctcgagggcttggtgttcggggtcggtttcagccagcaggtcggggcttgcgcccacgctgaagaggccgagggtgagcgtcatggaacgggtgaaaggcgcgaacatcgcggaagactccttgtcgtctttgcggcctttccggtcggaaaaggccttggttcaaagacgaaaggacagggggaactttaggcttaaacgagaatgattgttatctttctgttacaaggccggtttttcctgcagcaccacgtcggtcgggttggcctttttcggcttgatcaggctgaagtcgatcaggggcttttgttggcgctcgtaagggttgccaatcatccgcgggcgcggtgtgaagctgtcactcaccaggctttttgtacggtccagttcattgaagctaagaccggccagatcagcccaggtgtgaatcaactgcgagctggagtagggccgttgcaagtcaccggcgaagctccagtcgtgggtttcgcgccatttcggtgaggcataggccatgaacggaatggtgtacatcggcgctgtcggcttgccttcgttacgtcccagggtggtgtggccaatcgagtcgaagacatcttcgccatggtccgacaggtacagcaggaagccgttcggatcggtcttggcgtagtccttgatcaggcttgacaccacgaagtcgttgtacaacaccgcattgtcgtagctgttgtaggtgggtaactggtcgtcgctgatgcccgcgggcacgccctggcggtcggtgaatttgtcgaaggttggcgggtagcggtactggtagctcatgtgggtacccagcaaatgcaccacgatgaacttgcgctcggccggatcggccagggccttggaaaacggcgccagcacgtcgccatcgtattggcgggcgttctggttgcggttgttgttcaggtacacctgctcgtcggcctgttcggaaaaggtcgtgagcatggtgttgcgcttggtcatggtctgctggttggtgatccagtaggtcttgtagccggcctgtttcatcacgctgacgatggacggcgtcttcaggtacaggtcggggttttcttcgtcggcgaaggtcagcacctgttgcaacgcctcgatggtgtaggggcgcggggtgatgacgttgtcgaacaccgccagttggtcacgcagtttgtccagctccggcgtggtgttgcgcgggtagccgtagaggctcatgcgctggcggttggtggactcgccgatcaccagcaccagggtcgacggttggccggccatggtgtccttgaggttggtcaggggcgggatctggctggcgctgtcgagcatgccttgcatgttgtccagttgctcggtgtagcggcggtaggcgacgatcatctgccacggcacggccggttcgatacgggtttcaaagcgatcgatggcctgttccatgttgtcgctggtggcgatctgcttgaccagcggataacccaccaccgccagcacaatcgctgccgccgccagcatcgactggccgcgaggcaggtagaccgggcgcagccgcgtccacaggaagacggcgaaggcggtatgggcgatgaacgccaacacgatccaccaggcaaaatactgggtggcgtattcgccggcttccgagatgttcgactcgaacatgatgaagatgacgctttgggagaattcctgctggtagatgaagaaataacccaggctggccatggaacacgcccacagcaccacgccgatcaaggcggcgagcagtcgtgtacggcgggggaacagcagcatgggcgcaagccacagtgcactcatgaagaaggcttggcgaaaaccactgaaaccggaagtcccagtcaactggatcagcagttgggtaatgcccgagaagtaccagaaaaacaggaacagccagccaaggccggcccaatcaaagcctttcgcagacgtggtgctgcgtttgaacatcgccatccagcgctccaacccgttgatgtttcagttgacgcgcagtgctgcacgcaacagaagccacccttgcatggggtggcccttgggggctggagtatcgggagaggcatgtgaaaactttgtgagatttttgtagcggttatcttacaaagcgatgacggggctcagcagagcgcgggttgtgcaccggcgggctggtccaattgggcctggatgatatgggcacgcaggcgcaggacttcctgctgcagctgttcgcgctcgtctttcaactggcgcaactcgtcgcgacggatagtgacgtagagggtctgtggcggacgtgtcatctgtgcagtgctcattgcttacctcgcaaatagccggtgtgtcgcggtgtgccagaacgcttgagtcgaggttctcggcagcagtcagggcaattctgaattctttttgcaggcaatggaacttttttatttttgatggtcgtgtgactttttgtgccgtgatgctgaaacgatggcaacttttttccatgaaactagcggtatccgcgctggactaaccctcattagccgcattgcgctataaactatgtcacacattttttagtagttaggagcatcagcacatgcaactggggattatcggactaggccgcatgggcgggaatattgcacggcgcctgatgctcaatgggcataccaccgttgtttacgaccgtaacgaagcatttgtaaaaggcctgagcgaagagggcgccaccggcgtttccgacctcaaggccctggtttccgggctgcaaaagccacgcaccgtgtgggtcatgttgccggcgggcgcgcccaccgaagacaccatcaacgaattgagtacgctgctggaagacggtgatgcaatcatcgacggtggcaacaccaactataaggacgacgtgcgccgggccaaggccctggcggcaaagggcctgcactatgtcgacgtcggcacctcaggcggcgtctggggcctggagcgcggctattgcatgatgatcggtggcgacgccgagaccgtgcagcgccttgaccctatcttcaagagcctggccccgggccttggcaatatcccgcgtaccaaggaccgttccgccagcgccgacccgcgtgccgagcagggttacatccacgcaggccctgccggttccgggcacttcgtgaagatgatccacaatggcatcgagtacgggatgatgcaggcgtttgccgaagggttcgacatcctcaagaccaagaattcggaaaacctgcccgaagaccagcgtttcgacctcaacgtcgctgacatcgccgaagtctggcgccgtggcagtgtggtctcgtcctggctgctggacctgaccgccgacgccctggccaccgacccgaagctcgacggctactcaggctcggtggccgacagtggcgaaggccgctggaccatcgaagccgccttggaacaagccgtgccggtgccagtactgtccacttcgctgttcgcccgcttccgttcgcgccagcagagcacttacggtgacaaaatgctctctgccatgcgcttcggctttggtggtcacgtggagacttccaaaaaatgaccgccaacggcaagaaacccaaggccgaacccgctccgcccaccaccctgtttctgtttggtgcccatggtgatcttgtcaagcgcctgctgatgccggcgctgtacaacctcagccgtgatggcctgctgggcgatggcttgcgcattgtcggcgtggatcacaatgcgatcagcgacgccgacttcgccaagaaactcgaagacttcatccgcaccgaagcggcgagcaaggtcaagggcaatgccgataacgctctcgacccagcgttgtgggcgcaactggccaagggcatcagctacgtcgagggcgacttcctcgacgacagcacctacgccgacatcggccagaagattgccgacagtggcaccggcaacgcggtattctacctggccaccgcgccgcgtttcttcagtgaagtggtgcaacgcctgggcagtgccggcctgctgacggaaaccgacgacagcttccggcgcgtggtcatcgagaagcccttcggctccgacctggccaccgccgaggcgctgaacgccagcctgctcaaggtgatgagcgagaagcagatctaccgtattgaccattacctgggcaaggaaacggtgcagaacatcctgatcagccgtttctccaacgtgctgttcgaggcgttctggaacaaccattacatcgaccacgtgcaaatcaccgccgccgagaccgtcggcgttgaaacccggggcaatttcttcgaaaaaaccggcaccctgcgcgacatggtgcccaaccacctgttccagttgctggcgatggtggccatggagccgcccgcagcctttggtgccgacgccgtacgtggtgaaaaagccaaggtgatcggtgccgtgcggccctggtccctggaggatgcgcgggccaattcggtacgcgggcagtacaccgccggtgaaatcggtggcaagtcactgccgggctaccgtgaagaacccaacgtagcgcctgacagcagcaccgagaccttcgtcgccctgaaggtaatgatcgacaactggcgctgggtcggcgtgccgttctacctgcgcaccggcaagcgcatgagcgtgcgcgacaccgaaatcgtgatctgcttcaagccagcaccctatgcgcagttccgtgacaccgaggtcgacgagctcaagcccacctaccttaaaatccagatccagccgaatgaaggcatgtggttcgatttgctggcgaaaaagcccgggccgaccctggacatggccaatatccagttgggttttgcctacaaggacttcttcgaaatgcagccgtcgaccgggtacgaaaccctgatctacgactgcatgaccggcgaccagaccttgttccagcgtgccgacaacatcgagaacggctggcgtgcggtgcagcccttcctggatgcgtggaaggaagacgacggcatccaggcctacaaggccggtgaagacggcccggctgccgccgacgcgttgctggcccgtgatggccgcacgtggcacagcctcggatgagtgatgcagcgattcaccccatccgttttatcctcagtgacgtggacggcaccttgctgcacccggaccaccacctcagccagcgcaccgccgacgcggtgcgtgcgctgcgtgacgccggggtgtttttcagcctggccagcgggcgtccgcccaaggccatgctgcatctgatcgaaacgttcggtatcgatgtgccggtggcgggcttcaacggcggtacgctgatcaacccggatggcagcatcctggttgcccaccatttgccggcggaagcggcgctggtcaccctggcgctgttttcaggcgagccggacgtggaagtgtgggtgtttgccgacggtgactggctgcgtcgcgatccgcccgggccgatggtgcagcgcgaagctgatggcctgggctacgggccggtggtggtagagagtttcgagccctacctggatcggatcgacaagatcgtcgcggcgagcaacaacacccagcggctggtcgagctggaagcgcagttgcaacccaaggtacaggggctggcacacgtgtcgcgctcacaaccggtttatctggatgtgacggcgatgttggccaacaagggtgaagccctgaagaccctggctgcacacctgggcataccactggagcagaccgcggcgatcggcgatggtggcaatgacccggcgatgtttgaggtggccgggttgtcgattgccatggggcaggcggaggaaaccgtcaagcgtcaagccagtgtggtcaccggcagtaacctcgaggatggcgccgccgaggcgatcgagcggtttatcctggccggctgcaacatacgctagacagttacagcgataaggcaatgcagtacgccaacaatggacgctgaattctgcgccccacacctcggggcgttgactttgccgcatggccttcatgtcaggaggttgccttgcgggtgatggtacgtctgttgattctggagttcgaggtgcgtgaaaagtccacgagccggtcgctgcacggatatcgattaccactttatccgtggacacctcaaacgctatgccgagcgcaacatcggctacgcgaagttaaaggactacgcctctaaccgagaacttctgatcaatgttctgcgctcgaacattgatcacgaagttgccgaaacggtgttctttagcgaagacgtcagctcaacggtgcgctgagttacttcggcatggcccaggcttgcaactgatagccgctcttgtccaactcggcacgcgcctgcaacagcaagtcttcaagttgtgcggggttggaataagtgcgcgcatccagttgccggctgccgatacgggtattggtgcggtcgatgacgctcaggctcagggcgccattgccgtcatgccaggccacgcactgaaagggttggaaagcacggtctgcgatcaaaagagcttcgttgatgcggagcggggcgttcatgtgggtcgtctctctaaatgcccattcaagtgattgccggcggttgggctgaccgtgcggcgggttacttgtactgatgcacgatggcggggtacgggtcacatgttagagcaactattttaaacttttagtgattgacgtcatgtaagcggctgttttgaaagctgaatgaaagtttcggcatagcccaacttttcggcaaaggcgcgcagaagtggctttttgccccgacttatagcgaaacggtacaagcggtgcgtcaagaccttgctagtgttagccgcaggcgtcacaaaccgttgtttctaaataactttaacaattttgacgccaaggaacagtcatgggtgtgccccccgttcaacgtcggttgctagtggttgatccctgtgacgattgccacgacctgctgcccggtttgcgcacggccggctgggcggtcgacagttgcccattggaggcggttggcgagcggtcctgcgatgttggcctgttacgcttgcaaccctcccacttggagcgccccgaagcggtcaaggagttgatcggccgcagcggcaccgagtggattgccgtcctcagcccggatgtactgcgcctgcagaacgtgggtgattttgtctgcgagtggtttttcgacttccacaccttgcccttcgacgtggcccgggtgcaggtcaccctgggccgtgccttcggcatggcgcgcctgcgcggcaagggccacaccctggtggatgagccggagcatgagctgctgggtgacagccgggcaatccgtgagctgcgcaaactactatcaaagctggcgcccaccgaatcaccggtgttgatccgtggtgacagcggcacgggtaaagagctggtggccaagacgttgcatcgtcaatcccagcggcatgccaagccctttgttgcgatcaactgcggggcgatcccggaacacctgatccaatccgagttgttcggccatgaaaagggcgcgtttaccggcgcccatcagcgcaaggtcgggcgcattgaagcggctcacggcggcacgctgttcctggatgagatcggcgatttgccgatggagctgcaagccaacctgctgcgcttccttcaagaaaaacagatcgagcgcgtcggcggcagccagcccattcccgtggatgtgcgggtgttggccgcgacccacgtcgacctggaggccgcagtcgaaaggggcgcttttcgcgaagacttgtattaccggctcaacgtcctgcaagtggtgacggcgccgttgcgtgagcgtcatggtgacgtggcgatgctggccaaccacttttcgcgcttttacagccaggagacgggtcgccgcccacgcagtttcagcgagagcgccctggtggcgatggcaaaacacggttggccgggcaatgtgcgcgagctggccaaccgcgtgcgccgtggcctggtgctggctgaagggcgccagatcgaggccgttgatctgggattgcaggctgaacaggcaatttcgccgccgatggctacactggaagactacaagcaccgcgccgaacgccaggcgctgtgcgatgtgctcgaccggcacagcgacaacctgagtgtcgcggcccgtgtgctgggggtttcccggccgacgttctaccggttgctgcacaaacaccagatccgctagggcgggtaaaccgaaaagccccgcaacgacccttatcgttgcggggcttttccttgtgtgctgtagcgagcgggctcgccgtggtaaggcggcttgctgtggcgagcgggcttgccccgcgttgggctgcgaagcagcccccccggctctccctaaaagtaatacggaaacttcaagctaaacgtaaaatccggcgcatcatccgtcatcccgatcgccaggttcggcacgatcgtcaggttatccgacgccgcaatggtcatgcccacgttgaagtaaccggcgttggcatcgctggacaccaccgactgccaatccccaccgttaggcttgagcttgctcttgcgttgcaccaggtcggagaccgagaacgacatactcatcttctcgttcagggcgaacgccacgcccacaccgaattggaagctgtcgcccaggctgaccttgccgccgactttctggttgacgtcgctgctgatgtcgtcaaacgactcttgaaagttgtgggtgtaggagaacgaaccaaacagcaccgcagggtcgaacgtcttgaccagcgagatacctggcgtaaccgaccacacgccattaccggtgggcaggttttccggcacatacaggttgtcgttggcggttgacctgaccagcttgatgccaaacggttctttacccgttggcgccttgacgcgcagcgacaccaccgcatccggcagggtgggggtttcgtcgaggaacttgtaggccaccccgaagttgacgtcgccgatggtcgggtcacggctcacggattcttccgaggtggcgttggcgttgttgccggcgccgccggactgataagtcgactcgcggtaaaccaccggcacgttcacatcgaactgccaacggttatcgacgttgtaacgccccgtcaggtccagggtccagttgtccgacttgattcggtccaggttgatattacccaggaagatcgagtccagcgccaggaagccgttgagcgtgagctggcgcgcatcgtaacgcgcatacgtgatcccggtttcaaagctgaatttgccgttaccgaagaagccgctggcctcgttatagaggttgctcacgctttgcgcaggcgctgaatcgtccttgagcgactgcccataggaactgccgccgcctgcaccgccggatgccgctgccgctcccgtgccagccaccgtggcaccgctggctttctgaaagtccgccggggatttggccaggcgtttgggtgctggcgtcgccggcgtgtcctcgacctggcgcacccgttgctccaacaccgccagggctttttgctgcacttcgtaccgctgcttgagctccagaagttcctgtttgagggtctcgatatcggcgtctggcgcggcatacaacatggatgcgggcaagagcgtacttaaacagaccaccgcacgtagcgataacgatcgatgcatgaaataagccgtccttttctaatgcgaaagtgtcgagggtcagcgtagttcaataaccgagagtgcgtaggcctttgagttgatccaggttgcagttcaacgcggggttgttcaatccgttattcattaccacgttgagctgggtcatgttgttgacgaagttgttgttgccggtcagtaccgtgccttgcagcacctggccgccaccaatctgctggaggctgttgccttggttatgattggcctggatcgccatctgcaagccgccattgttggccgagacgctcacccggcctgccgcgctgtcgccggtgaccgtaccgccggccaccagcacctgccccgattgcgcggcattggaaggcgcaaagccgttttcagtgaggttgatcccgacattgttgtaggcggtgtttttgtcgccggcagcgcgcacgctctgggtcacgcctgtgccggtgcccaggccggcgcctccggtgacgttaccggtgccggtgctcgggttggtgccattcccggtcgaaccggtggtctgcacgtagaactgtggcgtaatggtcgatgagtcgacttgcatgctggccttgccggtgagggtgtcgcccacggcattggtccaggtgctgctcatgacaataccgaagctgatgatccgccccggcatcacataacggccgcgcaactcggccatttccgaatccttgagttcgatcggcttgaatgccgatgaagcataagcgggcattgaggctgccagacacaagaccgtcagccaacgggaagtgttcatctgctgctcctggagcgtcctgccccttattgcgcttcttagaagaagtcgctctggatgaaaccgaaatccatcagctcggcatcttttacaggatggaatttgtccagctggttcttcgcggtgagcggtgtgggcgggtcgagcaaggcattggccttgtcgtagccttcacccagcacggcgaacacgatgccgttccaacccttgacgaagtcgtcgcgcgaatagcgcttgtggcccagcaccgggtcgccgatatagacccagtccttgtcggcgcgctgcaacaccacgaagtgcttgtagccacgaatctccagcagcaccaccacggggattttcacggtcaccagggtgtccggcgaaatcttgtagccccgggcccgcatgccgatgctttcgaggtagcgcttcatgtccagcatggaaaaaccctgggtgcgaaccaggtcctggtctgcattgaccagcatgcctttgatcacgtggtcttcgtcgacgtcgagccaatagccctggcgcaggatggtggcgagtgccgcggcaccgcagctgaaatcggttttctgttccaccaggttggcgaagcggcgttcgcggatgctctcgaccttcttgtagatgactgcaccgccaggcatggcggaaatcgccatggtgcctgcccaggtcgggccggtgagcagcatcaagagggtgagggtcgcgaggcgcatgatcgtctgacctaatggacactggaataaaaaagggccttgttgccaaggccccgttggatcagaagcgcacgccgctgctgcaaacgctgcagccttggcctacagacaggctgttgctgccttggttgccagcgccggattgcaggttcacaccgatgttgccggagttgttgttgatcgagttatcggcactggcgttgttcgacacatattgaggtttgccgccgtgatggccgtacccggtagcggcggtattgaggtagttgttggcgagcgagttttgttcggtattggcagccgctgcgatgtttttgccatcagccgtggtgattgccaggttgtttttaccctggttgccttgaccggcttgaccgttgtaacccacgttgccggagttacggttcacggagttatccagggaggcgttgttctgggtgcctttgttgacgaagttgttcagtgcgctgttttgattcacatcgaccacagcgaacacagttgcaaagtcgcctttggcgctggagatggcgccagagttatcggcctggttgccactgccggcctgaatgttgacgccggcgttaccgctgttgccgtttaccgaattatcggcagaggcgttgttttcggtcttggtgtcgtcgtatttgttgccaatgctgttttgcacatcggtcacgacagaggcaaccacgccagttggttgaggcgctggatgccagccaccgccacctgcttgagctgcagcagccatgagtgcggcgagcgcgaaaaccattggtttcagagccatttgaggtttcatggtgtttctccttgcttctaattagttggttaagtgttggtacggtctagctagtgctaccaagctgttacttgatagtgatgcccagggtgttagccactcggttccccaccccggcactctggttcacctgtatcactcctcggctgccggtgaaggcctggtcgcttgtcacgacctggcggctgccagtggtgggggtgagccctgagtcggttgccagcgtcgtcgtgttctgttgcaacaggacgctgtcgtcgatggcttgcgggccaggattgacgctgatccgcacggcattgactaattggttattggccccggcggactggttgacgcccaacatgccgttgccattggtaaaagaagtgccctcgatcgccgccttggcgttcagggcaggatcgaccttgccgtccatcctctggatattgccggtggtggcctggccgcccagcgtgacagcgcggttgttcgccgtttgctgctggttgcccgccgcctggttgatcatcaggttgccggtgtagtccttgccgctgttgttgatcacggcgttgttgtcggccatcgccacggcgctgcccagcagggccagaatgaacagggagcgtttcatggtttgccccccagcatgccgcccaaattgttcaggggcgccatgccgcgctgaatcgaatcgctgatctgcccacccatgctgccgctgccgcccgagcggctggctgctgcgcctgcgcccagcgtggacatgccgttttgcgtggcactcaagccggtgaggttgctgttgggctggagggcggtgcgagtgatgcccaggccactgctgacgccgccgaagtcacggtcgctcaactcgcccgacagggcgctgttgatttctcggctgggattggcgttggcggtctgggggtaaggatccgggccaaaggaggagcggccatacatatgaccctgtacgtcgcggcccgtcacgatcacaccatcacctgccagggctggaagactgatactggcgctgagtacacagctggccagcagtacgttcatcgaaccttgagtgagtgtgatcacggcggcattccttattcttcacgctgaccctaaacagcgttgtcagggaaagagcagaacccgtgccgcttttgatttattactgtttttcaaaggcttgcgataactgcaaggcaaaatgatggccttgctgtatcagcggtgagacaaccgccctcgaaggcccggctatccatccactgcacaaccgcttcaccccgttgtatcagcgctgtaacaccgtgcatgacgaaacgatgaatccgctgtgcacgggcgatccagggacggtgtgtgtaaaaaaaatggacagtgcgggcgcaacgaagccaaaagcacgacgcaacaggctcagcctttgggggctttacgcggaatggaattgaggacgggattgccgtcctggttctgggtcaggtagaccggcaaaaccttgggcagggaggggatgaggttgctgacctcgttgatgttgtagatgccaccgatgcgaatcgccccggtgctggcgtcggccagcatcgccggtttgctgaggtagcggttgatcagcggcaacgcatcggccagggccaggttgtcgaggatcagcttgccttggcgccaggccagggccgagtcattcgggctgatcgcacgcacgctcggtgtggcatcgccctgttgatagctggcctgcatgccgggggtgaggggtacgctgccgtgcacctggtcgctgctgatctgcaccgagccttcaagcagcatcacccgcacttggtcttcatacttccagacgttgaactgggtacccgtcacgcgcacctggcccgcgccggcgtgcacgacaaacgggtgcgcactgtcatggctgaccttgaagaacgcctcgcccttgttcagggtgacgcggcgctggtccttgtagttgctgtagaccagctcggtgcccaggttgagctccacctggctgccgtcgccgagcgtcacttggcgcaggccgctggcagcatcgtagcgctcataggaactcggcagccaaccggcttgccagccggtaaaggcggcgaggggcagggcggccaggcagatagccgctgccaccgcataggtgcgcaaacggctgcgcggtttgaatggcaccaccaccggcgctgtgtcgctgcgcggcaggtggtcggcgacgtcccagatctccagcatcgccgcgtattcaaaggcgtgcagggggtgcgaatcatgccactgggcaaaggcctgacgttcgccgggcgtgcaatcgctcgcatgcaggcgcatgcaccaatgcgcggcggcgtcggtgatagcgtcatattcggcttctgaaagggctttttcgctcattaactcgtcctgatttcgcacattctaacctcctgggagggacggcgagaacagccatcatggcgattgcacatcaattggaacttattctcgtttggatgcgcctaaaaatttcaggacacgtgtcagtcattaccaccaatggagtacgaaaatgctgaagaaaacattaatcgccctgtgtgcaacctccgcattgctcagcgccggcgccgccatggccgaccgcccgggagccggttggatcaccattgaaaaagccatcgaggtggccaagaccaaggccggttatgtcgaggtttatgccgccgaagccgatgataacggctactgggaggtcaagggtcgcaagtcggatggcgtggtgtacgaagcccgcatagatggggcttcgggcaacgtcattcgcgatcagaaagactgatatccacccgggggctgctcaggctcccgggtccagttctcgacccaggtgagtgatcatgtaggcgattgaatcggcgttggccaggatgatgttgatgcgtttgctgtcgtcactcatgaatacctggcgcgcatcgtcgagtgtcttggcgccggtgatgttcaacacccgggtgcgtgcggtccgggaggcgtggcgcctgcccagttcttcgaattgctgcgcgtaatcgtcccagaccttgaacaagatgacgccgggtgtctgggtagacagggcgttcaagcgcaagtgatccagttcggcatggagttgcctgccacgcggggattgcacattgatcaggtcggtaaacggccgcatgctgtccaggtaggccaagtcttcagagtcagacaccaagtgggtcaactcgtggatcaaggtcgtggcgcgtgcgtgggccatgatgttgaaaggggcattcaagcggttctggtacatgtccagatcgggggcaaaaaaacggtcgagcaaatagatttttttgtcgatgtcgttgggcagggtgaaggcaatcaggtgttccgggctgtagcgcgcggtccccgtgacaaagcgtatcgagtcaggattgatcaacgtggggttcaccagttcgttcaacacctcatcgatccgtgtttccactttgccgacgtgatcgggcgtcaaggcatgaaccccgaacagctcggtaaaaaagcggcccaaccggctcagcgggtcgcgcgtgagcgcgaagttgaggatgttgcgtttgcaggtcaccgtgtagtacgtggcgacgttgagcgcctcgttgatgcactgggctttccaactggacagtgcggcgatctgcgtcatgccgaccgcttcgatattgatcgagccccattcccctatgcgagtcgcggcccggccggcaaaccgcgacatcgatttgccgaaacgaggatcacggtttcgcaaatccagcacccattgattggacggcgtaagcgccagcccaggccctgactcttcatcgcggtggatacgccagtgggtaccggcgtttcgcgccgggtagactttgcctgccaccggcacgtagtcccggccagtgtccacatcgtgatagacctgggtcttggggtcgtgtctcaggtccgtcagggcgacttcgtgttgttcgaacgcctgcaggtgggtgcgctgcggggcggtgatatccagcgtggcgagggtggtagtcgcagaggcctgcgtccagtcattgtcatcaaaggtggtcgcaggttcactgtccgggtacagccggttgagcgccttgcgcaaggacgccaattcggccacgccgccgacaaaggtcctgagtgcctcgccccagcgatgttgttgcaagtgttcactcgaggccttgaacagcttgtagctgcgccacaccaccaatgggtacgcgagcttgccggccatgaaggtcagcgcattcggaacccccttgtgcagcaggcgaccgaccactccccattgcgccgcgccttgcttgtcgaattgacaggcgagcattttcgtcagcagtacgacgttgtccttgaacaggcgcatgagaatattgcccaggatgggagcagaccccaaccgaatgtccgccgtgtcgcgccgatgctgcgccagcaggtttcgataggtggcctggtggggtgggtccaactgttggagaacccattcctgcaagtgccctggggtggtgagttcactcagcaagtcttcttcccgagcgtactcgcgcagtacatggtgcgggctgtagggcgcgtataacacccaggggcctgtggcattggtctgcggcccgatcaggtagacaccctgcacgtcggccactgaagcgccggctgtggcaaccagttgcaaggggcgaatgcacgctgtcacgccactgacttgcgcacgggcgaccgcgtcgggcatgtcgaagacctgctggataaacccccaggccgtggcggaaatccgttcttcgagtttttcctcatgggcgtattgcagcaactgccagggcagctgccggcagtagcgttgccggcgtgtgtgcgcgtcgttgtccgtggccagcagatgggtggtcagccacgtctgatacaccgatttgaggtccaactgctgcaccatttgcaccactgctgtgccgtccagcgtcgcgggcaagggtgtcgcggtgcgcgagcgtgggtggatttcatcggcctgcaggtcgggcaggtgacgctgggcaaagtcggtcaggctctgggtgttgccgttcagcgccttgcggatcgggaccaggatgttgtcggggtgcagtcccaggcctgggaaacgtgcttccagcagcgtgaccaatgcagcgctgacctgctcgttcagtggtgtgattccgtgcaggtaatcctgttcatccggtgcactgacgcgatattgctcgagcaattcggcgtgcaggatctgctcatcgggcgccgccatccccagccatacggggagtgcctgctggttggccatggcccgtgccagttgcatggccctgggcaggttggtgggcacggcctgctgcatcaccacgtccagatagtcctgcaggcgccgcgcccccaggttcatcgccagcaccgtatcgacgttatcggtgagggtttcggtatggctttgcaggcggttgtccagcaggtcgtcgtcgatacgttgcagtgggccgagggtgtaggcctggtgcggcgtgcgcaggcgattcggcaggttttccaggaagggcaggcgttggatggggtcttgcaggcgtttttgcaaggtttcgcgcaggtgctgtatggagttgaacacttcatgaccgcggcggggcgtccacagcaccgcctggccggagcgctgcgggtcggtgccgccgcgttcggtcagcaccaggcagttggccaacggctgcgcgggtgaagcggcgtcaaccatcagcgtcaacccgtaggcgtccggcaggaagccattcaaggcgtggcgcttcacccgcgtcaggctgtcggtgcgcaatacggtgtcgagcatttcctggccgcgctgcctgagggtgttgtccaaccggcgcagttctgcctcgctgcgcagcccgagcatcagggcgtgccgcaggtgagcgcgatgactgttgaggaacatctgcgggagtgggcgtacatcatggttggcgaatgtcaccatcgcgctgtcgatgattgtgttgaaggttgtcgtggtcaggctgttcaactgtttagcgataccgctgcggggtgcgctgtagaacccgacagtggtcgattcggggaccgaaacggcttcatgcgccaggcgctcgatgaagtgctcgaccatattcaatgagcgcagaggagcacgttcttcgcgctgttgtgcggcggtcgcgtaggtattgatattcacctcttcggccatcaaaggaagttggtgtttatccagctccgcattcagcgcatgggctgccaaccgtctgagtgtcggatgcgccgcacggtccgaggccagtgcctgttcaactgtgttcaactgctgccattgttgtttggcgcgttcggcctgcaccgtggacgggcgtccattgctgctggtgatggggtgcaggctccagcgcccgccggcgtccagcgtgtgcaggcgatggtcgatcaggccgcgtacatccagggcacagtccagcagcgcttccaggtttacctggccgtcgctgcgacggtacaggcccagggcgtattccatgttgctcagttgcttggccgcaatgtctttggccagttcggtaaagatgtcgccgttgatgggcaccccgatgatctgcagcgggtcaaggccgagcagcacattgcgttcatccagggacaggaaattgagtaactcgtcctcatgcccgctggccttgagcatgctgatcaaggtggcgttcagatcctccatgttcttgagcacctgcaagccgcgggtctgggtgtacaggtaggcgtggctattgctgatcatcagtgtgccagccaggtcgacatagtgctgggagggcgcgctgacgcggatcttttcgacgcgcaggttctcggcatgggcggtgcgcgctgccgcgtccgggagaaacatggccagcaactgctggctgtcttcggcgctcaggatgccttgttggcgcttgagcagcagctcggcacggaacgtgtcgctgagggtctgggccactagctccaggcgggagtggccgtccttgatgtcttcgttccagtaggtctgcaacaagctgccgagcagcttcgacaggattcccgctgtctgctccaccacgctttcccagcgacgctggtcctgggccacctgtgtcggcgtccagcccgaagtgacctgtttgggatgggtaaaggtgcgcgtctgcccgatgggccaggactgtttcaagtaatagtggagcaaggcctcgctcaacggcacggaggccagccattgcgggtcggcagtaggcgctatgtcactgagcgcaaagctgttcatgcgtgtatcgcggtgatcgaggctggggaagtaggcgcgcgccatgacggccagggacgtgtcgagcatcgttggcagcccgggaatacgacgcaattggtcgagcatgccctgcacgttgtgcaattgggcgtgctggatcgcctgctcctgatgttgcatcaccgggccttcaatggcctgtgccgccacggtcggtgctttggcagcgtccagggttgcgcgctgggcaatcgacagcaagcgcagcaagtcggcgcggcgtgagcggtccttcaggcgctcggtgatctcggtgagcacgtcggcgcggctgtcgaacacttccaggccgtcatagggcgtatagagcagtgccttttgcccgtcggggctggggctcatgatgaacgcgtcggcgagggggatgtccggtttctggttgatctgcagcagcaggctttccacgaccataggcgcttcctggtgcaccgggtttcggcgtgcgtggtcggtcgcgtaatacaggcgatgcagccagtccaggtccttgacggtcaaccccagcgcacgttctcgcggtgtgggttcgtctcgttttatgggcagcaggaattcatcgaagaagtagggaggggtgacccgggccattgcatactcaccgtcattgtatgaaggcctcagggtaaggagggccggttcgggctcggcggtaaataagtgcagcggtgggggctgatgcacaaacagacgttgacagcatgcgcgggccgcgttgtttaatcgtgggcctggatttcacgctggttgccccttccaatcataaaatcggagcttcagatgtcacaggtccatgagcaggctacggcccgcatcggctttaccgaactggtggcgttgcttcatcaggtcttcgtgaaccatggcacctcccccgaggtggccgcgatcctggcgcgcaactgcgcctgtgccgagcgcgatggcgcccatagccatggggtgttccgtattcccggttacctcagcaccctggccagcggctgggtggatggcaaggcggtgccggtggtcacggatgtcgcctcagggtttgttcgcgtggacgcagccaacggctttgcgcaaccggcgctcgaagccgcccgcgcgctgttggtggagaaagcccgcagtgctggcattgcgctgatggcgatccacaactcccaccatttcgccgccctgtggccggatgtcgagccgttcgccgaagaaggcctggtggccctgagcgtggtcaacagcatgacctgcgtggtgccccatggcgccgaccgcccgttgttcggcaccaaccccatcgcctttgccgcacctcgcgccgatggcatgccgattgtgtttgacctggccaccagcgctatcgcccatggcgatgtgcagatcgccgcgcgcaaaggcgagcgcctgccgccgggcatgggcgtcgacagcctgggccagccgacccaggaccccaaggcgatcctggaaggcggtgcactcctgccatttggcgggcacaaagggtcggcgttgtcgatgatggtcgaactgctggctgcggcgttgaccggcggcaatttttccttcgaattcaattgggccgatcatccgggggcgcgtacaccctggaccggcgaactattgatcgtgatcgacccgagcaagaccgccgggcaagcgttcgccgagcgcagccaggagctggtgcggcagatgcatgcggtggggttgcggcgtttaccgggggatcggcgccatcgcacacgggcgaagtcgcaggagcaggggatcgagatcgatcgcaaagagctggaacaattgcgggagatcgcgggactttaaacagggctgcgccgctggcgcagcccatcttgcttacttagttgcggcgaccgagcagcaggccgaccaccaggccaaaacctgcggaaatcgccacggtctgccatgggtggccaccgatgtaggtctcggtggcgtccaccaccggcttgctgcgttcgcgcacattggacaccgagtccagggcttgcttgagcttgatggcgacctgctcacgcagggtttcgccttcttcgccgaccagggcggcgctgcttttgagcagtttgtccgattcttcgatcagcgcggtcagttcgctgaaggcttggtccttgatttggtcttcgacggcttgggcagcggttttgcgggccattgtgtgactccttgcgagtgaatgtggcagtgaacaatggagtgtcggccagcggcaaaagttgcagtttttttgccgctgcctgttcttgagcaaaatccggatcaggaaatttcgacctacagtgtaagatgtcacctatttgtgcagcaggtaattcaacatgagcttcaatctcgccaacaagaccctcgccgaacgcgccgagctggaagatgaaaagtcccgcctctacgacctgtggcaaaccaacctgggcaaggccaagggcgaagccgcacgcttgttcggtgagcgcgccaagcgcaagggcaagtgggccgaatgggtccgcgcagagctcgacggcatgtcgccgccggagttctccaacatggtgcgcagcgaagtcaacaagctgatggcggccaacaagtaaagctcgccacgatcgcttcacgcactttcagcaacaacggatcaagctgcgcctgggtacgccagcccagctccaccgggtagcgcggcagtaccagcgggcagggcaacacgcgcaggccggtcatctctgcaatggcctgggccgcatgccccggaattgtggctaccgcttggctgcccttgagcaaaaacggtagcgcggcaaagtggctggtcgacgcgcacacctggcggctcaggccctgcgccgccaggccttcatcggtgatgccgataaacccgcctgacgacaccagaatgtgctcgcgcgtgacgaactcgtccaggctgatgtgtgcctggtccgaatccaccaggcagcgataatcaccttcccccagcacctggcggctcagcctgccctgggcaaaaccgccggcggtaattgccaggtccagtgtgcggtcgagcagggcaccggcgacgatctggctgtgggtctgacggaaaatcactcgcagtttgggcgcacgctgtgcaatcgcgtcgatcagtcgacggccgtaggccagctcgaaatcatcggataacccaagcaccaccgagcggccctgatactgctggttatccggattgaccattgccaggctctgccgacagcggtccagcgcctcactgatcaccggcttcaactggttggcccgcaacgtcggcgccaggccgcgcccggtacgcacgaacaattgatcgccatacacctcgcgcaagcgccgcaaacctgcactgatcgccgattgcgtgacgcccaggcgcaaggctgcgcgactggcgctggactcgtcgtgcagggcttcgaaggttttcagcaggttgagatcgacctgggcgatattcatctggctcatatcattcagcactgaagtgggctttattcatgatcgaggctggcgggagaatgggcaaccccccctttatttggagtgatcgtgatgcctgtttctactgtggcagccctgcaaatcggttccttgcccggcggcaagggtgaaaccctggcgcaaatcctgagttatgaggaccagatcctgcgcagcggcgcgcaattggtggtgatgcctgaagcgctgctgggtggctaccccaagggcgaggcgttcggcacacagttgggttaccgcctgccggaaggccgcgaagccttcgcccgttacgttgccaatgccatcgatgtaccgggcgcggaaaccgaggcgctggccggcctgtcggcgcgtaccggggccagcctggtgctcggtgtgatcgagcgcagtggcagcaccctgtattgcaccgtgctgtacttcgagccggcgggcggcctggtggccaagcaccgcaagctgatgcccaccggtaccgaacggctgatctggggtaagggcgatggctcgacgctgccggtgatcgacacagcggtgggccgcatcggtggcgcagtgtgttgggaaaacatgatgcctctgctgcgcacggcgatgtatgccaagggcgtggaagtgtggtgcgcgccgacggtggatgagcgtgagatgtggcaggtgagcatgcgtcatgtggcgcatgaagggcgttgctttgtggtcagcgcgtgccaggtccaggcctcgcctgaggcgttgggtatcgaggtggccaactggccttcagaccgccctttgattgcgggcggcagtgtgattgtcgggccgatgggcgacattctcgccgggccgttgctgggagaagccgggctgctgacggcccgcattgataccgatgagctggtgcgcgcgcggtacgactatgacgtggtggggcattacgcccggccggatgtcttcgagttgacggtggacgaacgcgccaagcctggcgtgcgctacatcaccgactgagcacaaccttgtggcaagccgtgtcaattaccaggtggcggtattgggcaggttcagcgtgccacggtccacaaagcgcatcgtgccgaacagcccacccgccagtttgcctcgcagcacgtagggcaggttgttcaggctctgggtctggctcaggcccagggtctgacgcaacacggagaacgccgaaacactcaccgggaccatcaggacggtctcggagaaacgcgggatggagccgctctggtcacttacccctgatgccaacggccggccattgacctccaggtccagggccacgccgttgtagtcgatcgccgtttcattggggttctgcacccgcagcttcacggcgaagcgcacttccaggtcctggctttgcagcggctcgatgccgaccacattgatgttcaccggatcacggttggggaacagcgcacaggcgctcaagctcagcagcaacagcgatagaaccatgagcctgcgcatacaaaggtgctcctatttcgtgacgtccgggtcctgcatcactttgagggtagaggactccggatcaaattcatcttcttccagctctatgaactcttccggcaggaaaatgttcagcaggattgcacagaaagcgcccacggtgatcggcgactcgaagatgttgtgcagcgccttgggcagctcgcgcaatacttccggcaccgcggcgacgcccaggcccataccgagggagatcgccacgatcagcacattgcgccggtgcaacccggcttcggcaaggatcttgatcccggccacggccacggtgccgaacatgatcagtgtggcgccgcccaacaccggtttgggcatcagttgcagtaccgcgccgatcatcgggaacagccccagcagcaccagcagcccggcgataaagtacgccacgtagcggctggccacgccggtcaactggatcacgccgttgttctgggcgaaggtcaccatcggcaggctgttgaaggtggcggccatcgccgagttgaggccgtcggccagtaggccggacttgatgcgcttgatgtacagcgggcccttgaccggctgttgggaaatcatcgagttggccgtcaggtcgccggctgcttccagcggcgaaatcaggaagatcaccgccaccgggataaacgccacccagtcgaacgagaaaccgtacttgaacggcaccggcacgctgatcagcggcacttcaggcagcgccgccatgtccacgcggcccagcagccaggccacgacgaagcccagggtcaggccgatcacgatcgagcccaggcgcaggaaggggttattgaagcggttgagtaccacgatggtcagcagcaccagcgccgccaggcccatgttgctcgcggcgccaaggtcgctggcgccaaacccgccggccatgtcggtgactgccaccttgatcagcgacaagcccatcagcgtgatgatggtgccggtgaccaccggggtgatcagtttgcgcagcttgccgatgaactggctcagcaccacctcgataaacgcggcgaaaaagcagataccaaagatcgtcgagaggatctcgtcagtgccgccaccccgggccttgaccatgaagcccgcgctgagaatcacgctgataaacgagaaactggtgccttgcaggcacagcagccccgagccgatcgggccgaaggtgcgcgcctgcacaaaggtgccgagccctgacacgaacagcgccatgctcaccaggtacggcacttcgctttccaggcccagcacgccgccgacgatcagcgtaggcgtgatgatcccgacgaaactcgccaacacatgctgcagtgcggcaaatatcgcggcggtgaagtgcgggcggtcttccagaccgtagatcaggtcggatttatagcgggggcgcggagcttgagcgtcagacaaaatgcgggctcgggtcagaaaatggaggcgcaggatgccagaaactgcctgtcgtcagaagtgtaaaaaaatatttataaagccccctgcgggaaaccacagcgccggccgatagcgtggtcaggcccacatactaatgacaacggtggtgaccaaggtctgggcagtgcgttgacgctgacagatcgtttcgcggcacggacgcgcgcagacactacttttgagagcacccccatgtccatccgtaatctgaatatcgctcctcgcgcttctctcggtttcgcgtttattgctgtgttagtggttgtattgggggtatttgcggtcaaccgtatgacgctgatccgccaggcctcggtggacatgagtaccaatcaactgccgagcgtgacttcactgtcggtgatcaccgaaaacgtgctgcgtatgcgcatcctttcgttccgcgtgctggtcaaccgtgagcctgccggccttcaggaagctgaagtgcgtatcggcgtgctggccgacaaggtgaagaccgcccaggccagttacgcagccttgcctgccgggcccgaggaggccgccctgtacaaggtattcacgaccaccctggacaactatctcaaggctcaggccgagatgctggcgctgtccaggcagaacaaggtcgatgagatgcgtgccctgatcaatacgcggatcaaggacggtaccgaccagatgggcgagcaactgaacaagctgatcgctatcaatgcagcggatgccaagcaagccaacgaggaagccgggcaaaattacagcagtgccatcactggcgctattgtcgtttcggttgccgctgcattgctcacggtattgctggcctggctgctgacccgcagcatcgtcgcccccttgcgcaaagccgtggaagtggccgaaaccatcgccggtggcaacctgaccaagaccattgaagacgacggcaaggatgaaccggcgcgcttgctgaatgcgttgtcgaccatgcaaggcaacctgcgccagaccatccagcacattgccggctcggccacccaactggcgtctgccgctgaggaactgagcgcggtcaccgaggaagcctccaagggccttcagcaacagaacaacgaaatcgaccaggccgccacggcggtcaacgagatgacggcggcggtggaagaagtggcgcgcaacgcggtgtccacctccgaggcgtcgacccagtccaaccaggcggcgcgggaagggcgcgaccgtgtggtggaaaccgtcggcgcgatccagaccatgacccaggacgtgcagaacactgccgcgatgatcgaaggcctggccacccaaggccgggacattggcaaggtgctggacgtgatccgcgcgattgccgaacagaccaacctgctggcgcttaacgccgccatcgaagcggcgcgtgccggtgaagcagggcgtggctttgcggtagtggccgacgaagtgcgggcattggcccaccgtacggcgcagtcgacccaggaaatcgagaaaatggtcgccggtatccagaacggcaccggtgaagccgtgcaatcgatgcaacagagcaaccagcgtacccaggacaccctggaaatggcccgcgccgccggtgtggccctggagcagatcacccagtccatcagcctgatcaacgagcgtaacctggtgatcgccagcgcttcggaagaacaggcccaggtgtcccgcgaagtggaccgcaacctggtcaatatccgcgacctggcgacccagtcggcggcgggtgccaaccagaccagcgcggccagccatgagctgtcgcggttggcggtggacctgaatgggatggtggcgcggttcgttatctgacctgaaatagggtcaaaaggtgggagggggcttgcccccgattgcaatgtgtcagctagacattggctgactgatacaccgccatcgggggcaagccccctcccacatttgccctgtgttgtgtcagcgctattgcttccaggcccctgggttcaccaggtttttcggtttttcacccgccagcgcctgcaacagattctccaccgcacacgtagccatggcttcccgcgtctcatgggtggccgagccgatatgcggcgtggccaccacattgttcaagcgcaacaacggcgagccatgatccagcggctcctgctcgaacacatccaaccccgccgcccgaatggtgcgctgttgcaacgcctgcaccagtgccgcctcatccaccaccttgccccgcgagatattgataaagatcgtctccgggcccatcagtgcgaattgttcggcgccaatcaacttctcggtttcagcagtgagtggcagcgtcaggcagacaaagtcggcctgttgcagcaagtcgttcaggctgcggtactgcgcgccaaagcgtttttccaccaaaggtttgggcgaatggctgtggtagatcaccggcatgccgaaaccgaaatgcccgcgctgggccagggcttcgccgatgcggcccatgccgatgatacccagggtcttgccgtgcacatcgctgccgaaatgcgccgggccgatattcttgctccactggccggcgcgcaccatgtcggccagctcgaccacacgccgggcggtggccaggatcagcgcgaagccggtgtcggcggtggtttcggtgagcacgtccggggtattgctgagcaggatgccgcgcccggtgaggtagtcgatatcgtagttgtcgacgcccaccgacacgctcgccaccgcttccagtcgtggcgccaggtccagcagcgtggcgtccaggcgcaggctggcacccaatagaccgtgagcggtcggcagggcatcgcgcagcttggccaggccggtctcgtccagcgcttcgatcagggtgacatcggcctgttcatgcaggcgggccatcaacggcgcggagagttttttgtacaacacgacagactttttcatgcggtctttaccttcaattccaggttgggcgccggtgtgcggtcactggcaccgggcttgagaaaaatcgtcaataccactgacagcagcaacgcgccgctcatcagcaggtacgaggcgccgggcgagccggtgctgctattgaggtagcccaccaggtacgaaccgccgaacgaaccgagggcgcccatgctgttgatcagcgccatggcgccgccggcgacgttggccgggaggatttccgggacaatcgcgaaaaacggcccgtagggcgcatacatgcacgcgccggcaatcaccagcagggtgtatgaccaccagaagtgttcggcgccgagcacataggacgcgtagaacgcgatggaggcgatcaacaacggcggccacacgaagcgcttacgtttttgcagcttgtccgagccccacgacaccaccagcatgccgatcaccgccgccaggtaaggcaacgccgacaaccagccggcctcgaccatgtccatctgcaagccttgcttgaggatcgacggcagccacaacacgaagccgtacacaccaatgctccagcagaaaaattgcagggccaggatgatcaccttgggcgagcggaatgcctcggcatagttcttcaccgccttgatgcccacctgttcagcggccagcgcgctttccaggtcttgtttctcggcgtcgctcagccatttggcctgggcgggcttttcatccgccagtttccaccagataaacgcccacaacaccgccggcaggccttcgatgataaacatccagcgccagctgaaatgctgcaccaggtagcccgacaccaccgacatccacagcatggtcaccgggttgccgaggatcaggaaggtattggcgcgcgagcgttcggcacgggtgaaccagtggcacaggtacaccagcatcgccggcatcaccgccgcttccaccacgccaagcatgaagcggatcacgatcagcatgtaggcgttggagaccacgccggtcagggtagcgaggccaccccacaggatcaggctgacgaagatcagcttcttgacgctacgcttttgcgcatagatcgcccccggtacctggaaaaaaaagtagccgaggaaaaacagcgcccccagcaacgacgacatgccgggggtgatcatcaggtcttcggccatcccggaggcggcggcgaagccatagttggcgcggtccaggtacgccaggctgtaggtgataaaaacgatgggcatgatgtaccaccaacggcgggtggcgagtttcacggtgtccatggggttgctcctgagcttgttgtagttgtggcaacagggaatgaatcaggcaacggatcgagcgggtaactctgaacgggtgggcaagccttccatatcgccacggctttgcacggcgcggctgccgatccagttgccgcgctgtaccgcttcgcggaagctgaggttttccagcagggcgctgatcatgcccacggcaaagccgtcgccggcgccgacggtatcgaccaccttgtccacgcgcacggcggcgacgaagccttggtccatttgcgtgcggtagtaggcgccgtccgggccgagcttgatcgccacggcttcggcgccctggtcgaggtagaacgcggcgatgtcggccgggtcatcgaagccggtcagcagtcgaccttcgcccaggcccggcagcacccaatcggccaggccggcaagggcgttgatttcgcggatcatcgtctgttcgctggcccacagcgacgggcgcaagttggggtcgaacgacacgctgcgcccggccttgcgcatctgcgtcatcagctcggtagacaactcgcgggtggcggcggacaacgctggcggaatgccggtggcatgcagatggcgggcttgcagcagggcagggctgatggccgcaacggacaaatggctggccgccgagcctttgcggaaatactcgacctgagggtcatcacccgtttcttcacgggacttgagctgaaaaccggtggggtgcaacgggtcgaccgccacatgccggcagtccaggccttctttgctcaaggtctccaccacaaagcgcccgagggaatcattgcctacccggctcagccaggccacgttgaatcccaggcgcgacaggccgatggcgacgttgctatcggccccggcaatgcgcttgtgaaactgcgccacttgcgccaggtcgccgctctgttcggcgacgaacatcgccatggtttccccaaacgacaggatatcgatctcagacatgggcattctccacgcgcggttggccaaggacggcgagggtggcaacgtgccgggcggtgacctcgaccaggtcatcgccttgcagcgggaattccaccgcccgggtaattccttgagtcatatgcttaagcagttgttcccacagatgcaggtcggtggcgcccggcggcacggcgaccagcttgccgtccgggcgacgggccacggccttgcaatgcaggtagtccacatgtcggcccagcaggcgtgcggcggtgagggcggattggtcctgccactgccagttgccgatatcgaaggtcatcttcaccggcagggccaggcgctccacttcgctgaagaagcgttgcatcggctcgatacgcccgccgtgcagggtctggtcgttttccaccagtaactgcacgggttggcggcggagcagggcgtgcaggctgtccaggtcgttggtgtcggtgaagtagccgagggatactttcaaccattgcgcgccgaaagcctgtgcgcggtccaaggtcgctgccagttcggcattcggttgggcgcggccggcgacccacagttccaggggcgatgagaacaccgattccaggttctgttgcgccgcggcctcggccagttccgtgggctgttcgtgggttaaaagctcttcgcgccattcgatgcgctgggcgccggcggcggcgagaacctcgacaaaactcaactggccttgttggcgtaccaagtctgcgccgtagctggaaaggctgatggagacggggtatttatgcattgttgtttacctctgaaaccggtttcatttttgttcaaaattttttagacgtgccgggtcgagccacgaaggatcaactcgggcaggaaatccagggtccgtgttggctcggtatcgccgcgcaagcgcttgagcaggcaattgaatgccgttgcaccgatggcttcggtcggctgggcgagggcggtgatgccagtgcctaccagcggataccagtccaggtcatccagggcgatcaggccgatgtcgtcgaacaagttgcaaccgaggttcttcagcacccgggtgcaggccagcgccgcgacgccgttggcacagaacagtgccttggggccaggtttggcaagaaaggtgtgcaggtgtttttgcagtgtttcatccaactccagcacagcgccggtcaatgccgggcggccggcgatttcagctttgaaactgtccaggcgctccaggcgcgagctggtgccatcggtggcttcacttaccatcagcacatcgcggtaaccctgtcgctccagatgttccacggccatgcgcactgccgccgggttgtccagccccaccagatcgctgtgcagcggctcgaccttgcggtccaccagcaccagcggcatttcccgttgcagttccagcagttggtcgaggtgatggccgagggtgttcacgatcagcccttcgatgttgtacgaacgcagcgccgccaggtgttggcgctcctgcgcgtcatcgcggtcggtgttgcacaccaccaggctgtagccatgctggcggcacgcagtttcgacgccgtgcatcacggcaatggaataggggttgcggatatcggccaccagcatgccgatcaggcgcgtgcggccgcgtttcaagccgcgagccatctggttggggcgatagccgagttcatcgatggcttgttcgatgcgcagggcgatggcatcggagagcagggcgcggtcgtcgccgataaagcgcgacacgctagccttggacacgccggcgcgctcggcgacgtcgagcatggtcacgcggctgcgctgggcggcggaaaatttgttcacggtcatcgaccttcttttcttattggaatgactgaaaccggtttcaggagagcactaaaccagtaaagtcgtcaagaagatgcagggcaaggccagatgaccggtacgctcagaccagcacacccaaccaggtcgcgcccaacagcagcagggccataccccgattgaaacgttgcatggccgtggccgaacgaaacacccgtgaagcgccggcccccagcagcgcccaagtgcccaggcaaggtatcgagatcaggaaaaacaccagggacaactgcaccacctggctttggcgctcggcaccctggccggcaaatacactcaccaccgcgagcgccatcatccaggttttcgggttgatcaattgcaggctggcggcgcctatcaggccaaggggtttttcgctggcggccacttcgacggcttgggcgggtgcactgaagatctgccaggccaggtagctcagccaggcgacgccggtccattgcatggccgtttgcactttgggcaaatgcaccagggactggcccacgccggtccccaccagcaacacaagaccggcagccccgacgcaggcgccgaggattatgggtaacgcggctctcaagccataccgcgcgctgttactcagcaccaggatattggtagggcctggcgtaatcgaggcgacaaaggcaaacaacatgaacggcaacatggcaggtgactccgacaaatccagtgatggcgtcgatcttcactggccggtatgtcatctgtctggaagatttgagcagcgcttgcggtacgcggcgggtgtcaagccgtaggcgcgcacgaaccagcggcccaagtggctctggtcggcaaaaccgagggccatcgcgacatcggcgggttgctcgcccttggccagcaagtggcgggcgcgggccaggcgcagttgcaccaggtaggcgtggggcggcaggccgaatgcgctcttgaacgcacgggtcaggcggaaacggtcgacgccgcaggccagggccaattcgtccatgcccacatcaacgtgcagatgggcgtgcaggtattcccgcgccttgtgcgcaaccagtggcaggcgcgggtcttcacggtagcgagtgcgccagtagagttggtcggtgaggcgctccaacagctggtccatggcgcgctggcgcacgatgcgcagttcgccgctgtgcagggtctggaaggcttggctggtcgccatggccaggcgcgggtcgcgggtcaaggtgctggcgaaagccagttggctattgagcggtgcttcttcaaacaccgcgctgacttcacgcgccaaccactgtgggtcgaggtagagcatgtggtaagtgaagccatctacagtgggcgcatcgccgtcatgcaattcgccgggctccaccaggaatacctggccgggcacgctgttatgtcgggtacggcggcagttgaattgctgcacgccttgctcggttacgccgatcaggtagctgtcgtgccaatgcgggtcgtacgcatgaccttcaaaatgcgcgcgcagggtctcgatgccggtgtcggcgtcctgggacaggtcgatccaattgtgcgcggccataaatcaccgaagcggaatacgtgaggctattagcgcccagcgtcgggtgggcgtctagaaggtttgtgcagcatcaaccgaacaacccggcggcgatattgatcgagaaccccaggatcgcggtgttgaacaaaaaaccgatcagcgattgccccagcactactttgcgcatcgcccgggtggcgacgcccacatcggaggtctgcaccgcgacgccgatggtgaacgagaaatacaggaagtcccaatagttgggcgtcagcagcccttcggcaaagcgcagcgccggctccttgccgtcccaggtgtaatacaggcgcgcgtaatgcacgctgaaaatcaccccgatcagcaaccatgaaccgatcactgtcagcccggtaaagccgtagtgcagcagacgttcagtggtggctaggtccttgctgccgaccagttcaaaggtgatggtcgccaggctggcgatggcggcgatgcacacggtgaacagcaccagcccggcgttttcatcttcgacctcggcgatgcgcttcacgtcctcggccttggcgcgacgggtgagccacagcatcagtaccaggtaggtccagaccccggcgttccagccaatcaggattttgctgaccagagtgtcagccggcgccaggatgcccacggcaaggccgagcacggcggcgacggagaggcgagggtgggtgcgggcgaggaagggcatggcggctcacagctgacagtgggtcaactgactgtacctcatcatgtgggagggggcttgctcccgatggcggtgtatcagtgaaaaatggttcagctgacataccgcatcgggggcaagccccctcccacagggtttaactcggtttaccggggagatttcttcactagcttcatgaccaccacaaagaacaccggcacaaacaccaccgccagcgttgcggtgatcatgccgccaatcacaccggtgccaatcgcctgctggctcgcggaactggcacccgtggcaattgccagcggcaccacgccgaggatgaacgccagcgaggtcatgatgatcggtcgcaagcgcaagcgcgcagccttcagggtggcgctcatcaggtcttcaccctggtcgtacaggtccttggcgaattcgatgatcaggatcgcgttcttcgccgacaggccgatgatggtgatcaggcccactttgaagaacacatcgttgggcatgccacgcaaggccacggccaataccgcgcccagcacacccagcggcaccaccagcagtaccgaggtcgggatcgaccagctttcatacaacgccgccaggcacaggaacacgatcagcagcgacaagcccagcagtatcggggcctgggagccggacaagcgctcctgcaacgacaagccggtccattcctggcccaggccggcgggcagttggctgaccaaccgctggatctcgtccatggcttcgccggtactgtgccccggagcggcttcgccggaaatcgcgatggccgggtagccgttgtaacgggtcaactgagccgggccctgggtccatttggcttcgacaaaggcggacagtggcaccatcttgccggcgttgttgcgcacgttgattttcatcaagtccgccacctggctgcgctggtcgccttcggcctgcaccaccacgcgctgcatgcggccctggttggggaagtcgttgatataggccgaaccgatggccgaggacagcacattgccgacatcggcaaacgacacgcccagcgcattggcctgcttgcggtccacttcaagctgcacttgcggtgcttcggccagcgcgctttcgcgcacgttggccaggatcgggcttttcgcggccgctgccagcaactcggtacgcgcggccatcaacgcggcatggcccacgccaccgcggtcctgcaggcggaactcgaagccgctggaggtacccagaccgtccacgggcggcggcaggatcgcgtaggccaccgcatctttcagctcgctgaaggccatgttggcgcggtcggcaatcgacgaagcggaatcgtcgctgccgcgctgcgaccaatccttgagcgtggtaaacgccagcgctgcgttctgcccggagccggagaagctgaagcccatgatcatggtggtatcacccaccccaggctcctcggcgttgtgcgcttcgatctgctcggccacctgcaccgtgcggttcttgctcgcaccgggtggcaactggatgtcggtgatggtgtagccctggtcttccactggcaggaacgaggagggcaggcggctgaacatccagcccaggcccaccagcaacaccaggtagatcagcaggtagcggccgctgcgcttgagggcataggccacccagccttcatagcggtcggtgaactgatcgaaacgccggttgaaccagccaaagaaaccgcccttggcatggtgctctccctgggggatcggcttgagcaaggtggcgcacagggccggggtcaaggtcagggcgaggaacgccgagaacaggatcgaggtggccatcgacagcgagaattgctggtagatcacccccaccgaaccggccatgaacgccatcggcagaaacaccgccaccagcaccagggtgatgccgatgatggcgccggtgatctggcccatggcctttttagtcgcctccttgggcgacaggccctcggtggccatgatccgctcgacgttctccaccaccacaatcgcgtcgtccaccaggataccgatggccagtaccatgccgaacatggtcagcacgttgatcgaaaagcccagcagcaacatggtggcgaaggtgcccatcagcgcaatcggcaccaccagcgtcgggatcaaggtgtagcgcacgttctgcaggaacaggaacatcaccgcgaacaccagcgccatggcttcaagcagggtgtagaccaccttggtgatcgaaaccttgacgaacggcgaggtgtcgtacggaatcttgtattccacattggccgggaaatagcgcgacagctcgtccatcttcgcccgcaccagcgtcgcggtgctcagcgcattggcgccgggcgacaactgcacgctgaccgcggtggagggcttgccgttcaggcgtgtggagaactggtattcctggctgccgacttccacccgtgccacatcgccgatgcgcacggtggagccgtccgggttggccttgagcacaatgtcggcgaattcagccggcgtcgacaactggcccttgaccaggatcgcggcggtgatttcctgggtattcgtgcccggcaggtcaccgatgctacccgccgagacctgggcgttctgcgcgctgatcgcggcgttgacgtcggctggcgtgaggttgaagccgatcagcttctgcgggtcgatccagatccgcatggcacgctcggcaccgtacagctgggccttgcccacgccatccaggcgcttgagctcgttcatcacgttgcgcgccaggtagtcgctgagcgccacgtcatcgagcttgccgtcgttggacgtaagggtcaccagcaacaggaagccggcggagaccttctccacctgcaagccttgctgggtcaccgcttgcggcaggcgcggctcgacagccttgaggcggttctgcacatccacctgggccatttccgggttggtgcccggttggaaggtggcggtgatggtggccgaacccaggctgctctgggattcgaaatacagcaggtgatcggcaccgttgagctcctgctcgatcaggctgaccacgctttggtccagggtctgggccgaagcgccagggtacaccgcgtagatttcgacttttggcggcgcaacgttggggtactgcgccaccggcaactgcgggatggccagcaagccggccagcaggataaacagggcgaccacccaggcgaagatcgggcggtcaataaagaactgcggcatggcgggttattcctttacgagcgggctgtcgtccacttcaactttttcaccggggcgcgcgtgttgcaggccttcgacgatgatgcggtcaccggccttgaggccgctgctgacgatccagcgatcgttgaccaccgcgcccaactccaccggctgctggctcacggtctgctcggcgtccagcagcaagaccatcgggataccggcgctgtcacgggtgatggcgcgttgcggcacgctgatgccttgcttgtcgacggcttgctccaggcgcacccgcacaaagctgccgggcagcaggtcgaggtccgggttggggaactcgctgcgcaggatgatctgcccggtgccggggtcgacgctgatctcggcgaacagcaacttgcctggcagtgggtacaggctgccgtcatcctcgatcagcgtggccttggcctggtcctggccaacctgcttaaggctgccagcgcggaaggcgcggcgcaggtcgttgagttcgcggttggactgggtcaggtcggcgtggatcgggtccagttgctggatgatcgccagcggcgtggcctcgttctggccgaccagcgcgccttccgttaccagcgcacgaccgatgcgcccggaaatcggcgcggtcacagtggcatagcccaggttcaagcgggcgcgctccacggcggccttgttggcggcgacttcggcgttggtctggcgcacggcggcgcgggcgttgtcgtagtcctggccgctgatggcgttgccttccaccaattggctgtagcgctgctcctgcaggcgcgccttgaaggcatccgcctcggccttgctcaggttggcctgggcgctgtcgaggtcggccttgaacggcgcggggtcgatgcgaaacagcacgtcgccctgtttcacgtcatggccttccttgaacacccgttgcatcaccacaccggcgacccgtgcgcgcacttcggcgatgcgcggcgcggcaatgcgcccgctcagttcgctgctgatcgacagcggcttggcttccagggtttcgatgcgcactttggccaggggcatttccggcgcttcggcggcagagtcaccacatgcgctaagggccagggtgagggccagcaggcaaaatggcgcaaacagattcttcgacatgctcttatcccaatattgactggcgcatcctaaggtcacctgcgccgtggtgctgtgaagctgtgtagctcgtgtgtgaagaaatgtaaggtgcggcgcgcggggcgccgggggcgtatatccttgcacaatcctgcaaacactggagatgccatgtgggagggggcttgcccccgatagcggtgtatcagtcgaaatatgcttcactgagccaccgctatcgggggcaagccccctcccacgtgggatttgtgtacgaccaacaactgtattttctggaaacacctttatgcccaacatcctcctggtggaagacgacgccgcactttccgagctgattgccagctacctggaacgcaatggctaccacgtcagcgtgctcagccgtggcgaccatgtccgtgaacgcgcacgcctgaacccaccggacctggtgatcctcgacctgatgctgcccggcctcgacggcctgcaggtgtgccgcctgctgcgtgccgactcggcgggcctgccgatcctgatgctcaccgcccgcgatgacagccacgaccaggtgctgggcctggaaatgggcgccgacgactacgtgaccaagccctgcgagccgcgtgtgctgctggcgcgggtgcgtacgttattgcgccgcagcagtctttccgagccccaggtggccaacgaccagatcatcatgggcaacctgtgcatcgacctgtccgagcgcaccgtgacctggcgcgaccaggcggtggagttgtccagcggcgaatataacctgctggtggtgctggcgcggcatgccggtgaagtgctcagccgcgaccagatcctgcaacgcctgcgcggcatcgagttcaacggcaccgaccggtcggtggatgtggccatctctaagctgcgccgcaagttcgacgacaacgccggcgaggcgcgcaagatcaagacggtgtggggcaagggctacctgttcagccgttccgagtgggaatgctgagccatgtttcgtgtattgctacgcctctacctgatcaccattgttacctacagcctggcgatctatctgatcccttcgttggtgatccagctgttcgaacaccgctacatgaactacaacatcgagcagacccgcggccagcaaaagctgatcgtcaagcaataccagcgggcaccggtggagcgttggtcacaggtgaccgagcaactgggccgcgattttgcgccgctgaaagtgcaattattgctgcgccaggacgccagctacaccccggcagaagaacagttgctggagcagggcaagtcggtggtgcgcctgggcgagtggggctggatggagcagatcagctcgccgatcaatgagcaattcgtggtcaagctgaccataccgcccgacccgatggacatgaacgtgctgtattgggcgatcaacgtgctgatcgtcgccgcgttactggcctgcctgctggtatggctgcgcccgcattggcgcgacctggaacgcctgaaaagcaccgccggacaactgggccggggcaacctggccgaacgcacacagctgccagccagctccagcatcggcagcctggcggcggtgttcgacaccatggccgacgacatcgagcacctgctcaaccagcagcgcgatttgctcaacgccgtttcccatgaactgcgcacgccgctcacgcgcctggatttcggcctggcgctggcgctgtccgaagatttgcccgaggccagtcgtgaacgcctgcatggcctggtggcgcatattcgcgagctggatgagctggtgctggagctactgtcctacagccgcctgcaaaacccggcgcaactgccggagcgggtcgaggtggtgcttgatgagtttatcgacagcgtactgggcagcgtcgacgacgaactggaaaaccccgagatcgtcatcgatgtcgcgctcgactgcgccgtggagcgcttcagcctcgacccgcgcctcaccgcccgcgccttgcagaacctgctgcgcaatgccacgcgttactgcgacaaacgcattcaggtcggcgtgaacgtctgcgccaagggctgtgaaatctgggtggacgatgacggcatcggcatcccgctcgaccagcgtgagcgcatcttcgagccgttctaccgcctggatcgcagccgtgatcgcgccactggcggtttcggcctcggcctggccatcagccggcgcgccctggaagcccagggcggcaccttgaccgcgctggcgtcaccgttgggcggtgcgcggttccgcgtgtggttgcccaacgtcgcttgatcaaagcaccttgacggcgcggccgatcgcctggattggtccggtgggcttgccggtcggcgagccccgtgggtcttccagggtcagctcgaacagctggttctgcgtcaacggtggcagcttgtccagcggcaccgacagtgtctggccgggcttgaccagccccaacgacaccggcccctgccacccatcgcccttggtccagaactgcaaggccttgtcggctggcacttccatcacgcccaaggggatcaactgaatctgctggtcattgctggcctgaatcacccagcccggtgcttggctttgcggcgcgaccagcaccaccacaaagcggggttccaggacgggcggacgcgtcagcaacagcgtggccagggccagcgtggtgaccagcccggcaccggccaggccgcgccatacggccagcaggttccaccagggggtgtgggcgctggcagtgtggcgctcgatgcgtcgccacaattcagcggagggcggcacgggctccgccaaggcggtcaacggcaacagacgctgctcccaggcgtcgactgcggcgcgcagctcggcgtcgtgcttgagtcgttgctccacttcggcgcgctgttcgccgggcagggtgcccagtacatattcgccggccagttcgtccagagggttgctcatgccatgcactcccgcagcgcggcgaggctacgtttgatccaggctttgacggtccccagcggggtgtccagtttccgggcgatttcgctgtgggaaaaaccgtcgacataggcatgcaggatgcacgtgcgacgggccgggtcgagctgctccaggcaggtgtggacttgcccggagcgtgcggtgaattcaaaggtgtcggtggctgcgacctgctcgtgttcatcgtccagcggcacttcgcggtagtgattgcgcaccacattgagcgccaagtgccgggtcacgctgaacacccagccacgggccgaaccgcggctggggtcgaaactgccggcgccacgccagatcttgatgaacgcgtcatgcacgatgtcttcggccagggccttgtcccggacgatgcgcagcgctacgccgagcaagcggctgctgtcctgctcatagagctggcgcaaggcacgctgatcaccacgcgcgcaggcctgcaggcaggcgtcgtaatcaaacacgtggtgctccccccaacgatcagtattgggggcagcgtagccgactttgctcagttggccgcccagaagatgtaatccgcctggtacttcaccacttcctgcttgcccttgttggccgcggtgcacgcgctgctcggcgccacgccacccttgagcgcgacgcgttggatgtaactcacgccgctcatcgcacccttgccttcggctgggttggccttgaccagttgatacggcaggttgcccgcgccggacggcgccacggccaattgggtgccggtgattttcgaaccgtccttggcctgccaggtggcgggcggaccgaagtaggtgccgacttgtttgccgctgcggtcattcaataccgccttgggcccgacaaacgtccactcggtctggccggcagcgttggctttgtcacggcactcgtaggtgatttcgccgacgccggtggtttccaacgccactttgtggccgtccggcaccttgatgctgtcgggcaagtcggcctgggttgcaaaggcggccggcgcggcggcgagcagggcggtgaggcagaacagtgctttagcgttcatgggtacttctccatttcagtaaaacagcggggtgactgaaaggactacccacggcgagcacgattggatgcagcgattagaaaataaacctcagagggcgcacactgtgtccccgttttacccgaggagagattggcaatgactggtgtgcacacgtctgctcaacaaggtttctctacccaggccgttacctacgcccaggggcggccggattatccacggcaactcaccggctggctggccgacacattgcgcatcagcgcgcagtccagcgtgattgacctgggcgccggcaccggcaagttcacccgtttgctcagcaccctggcaccgaccctgatcgcggtcgagccggtggcggcgatgggcgcgcagttgaccaaactgctgccggatgtgcgcctgctcaatggcaccgctgaatccatccccttgccagccgccagcgccgatgcagtggtgtgcgcccaggcgttccactggttttccaccgaggcggccctggcggaaatccatcgcgtgctcaagcctgacggccgccttggcctggtgtggaatgtgcgggatgaatcggtggattgggtcgccgcgatcaccgacatcattaccccgtacgagggtgatacgccgcgctttcataccggccgctggcgtgatgccttcagcggcaagtatttttcccaacccgaagtgacctgtttcccctacagccatgttggcagccctcaggaggtgatcatggatcgtttcctctccgtgagctttattgccgcgttggccgatgagcccaaggcccgcgtcaccgcgcaattgcaggcgctggtcgacacccatcctgcattgaaagggcgcgacaccgtggccttcccgtatcagacccaggcttacgtctgtcatcgactggtctaaaaggcataaagtcagatcatattggtataagtcgttataagaaaaatcgctatcctgcggccagaaatttataaggccgcaggtagctgtaatggatgtgggtaattttggtttcgtggttgccggcctgatcgttggttttatcgtgggcatgaccggtgtgggcggtggttcgttgatgacgccaatcctgttgtggttcggcatcaacccggccaccgcggtaggcactgacctgctgtacgccgccatcaccaagtcgggtggggtgctggtgcacggcaagaacaagaacatcgactggaccatcaccggctggctgacccttggcagcgtgcctgcggtgttgctgacgctgtggttcctggccagcctgcacaccgatcccagcgcgatgaatgcggtgatcaagcaggcgcttggtgtggtgttgctgctgaccgcgttggcgattctgttcaagaaccgcctgttggcgtttgcccagcggcatgcgggtgatagctatcacatgagcccgcgcaatctgaatgcgctgacggtggtgacgggggcgatcctcggtaccatggtggcgctgacgtccattggcgcgggagcgctggggacggtcgcgttgtttattctgtatccgttcctggctacgcggcggctggtggggactgagatcgcgcatgcggtgccgctgaccctggtggcggggttggggcatgccagcatggggaatatggattggcatctgctcgggtttttgttgatggggtcgttgccggggatctatgttggtagtcatatgacggggaagctgccggacggggtgttgcggccttgtttggcggttatgctcatggccattggttataaactggctttctgattgggggtatatccgttatttaggtaacggcggctattggttccgcccttacggcgggtcacttttggaagagcgagcgccaaaagtaaccaaaaacgcttcgccccaacactcggcaccgagcctgggcgaggtgccgagtgttggggcaagagcgttttgcttacttttgcgctctttcaaaagtgagccgctgtaagagcggaaccataagtagccgttacccaaataacggatatgccccctataaaaaacctcaacccacgacgccaggcccattcccaatctgccaaacaaacggcggctcagccccattgaccacccaatcccccacaatccgcgccttgtaaatcaccggattatgcgacgacaccgtccgcgcattccgccaatgccggtccagcgccttaccctggcgcacatccgaagcccccaacgcattgaacaactcactggtcgcccgctggatcaaccccgacaccaccacctgcgcggtagccgactcaatctcggccgccacgttcgcttcgcgctccaccgcctcatcccccccaaaccgcgccacatacgcccgttgcgccggcaacgtcgccttcagcgcactcgcctcggcggcatacaccagcgccgccacttcacccaccacctgttgaatctgcgcatcctggctgacatgcgccgcattgccatggctgtagatgcgcttgcggctgcgcacttggtgcgccacatcgcgcagtgccgcacggccgatacccgccaaggtggccagcagtaccaactggtagaacgcggtctggtatttgaagcgcgtggcaaagtcgatcacgttgtccgcctccaccaccgcatcgctaaagcgcgacgtgccgctgccggtggtgcgctggccaaagccatcccagtcgtcactgtgctccacgccaggctgacgggcgcgggttgcggcgatcacgtcgccaccggtgtcgctgcgttgggcgtacacgtcgatccagtcggcgaagatgctgccagtgctgtagaacttctctccgttgagcttccagtggtcgccgtcggggctgacctgggtgaccacgtcgccaatggccacgttgccgatttcggtccaggcacagccgacgatatcgccgtccacgaaacgcttgaaccacaggtcgcggccggcgccggacggtgcattcaggcggtcttcggcaaaggcgaagtgcccgcgcagggcctggggcacgttggagtcggcttcggccagttcgatcagcagttcgaacaactgcggcaatgaagcaccaccgccgccatattccaccggcacgcggacggcgccaaaccctgcctctttgagccactggatcggctcatggggcagggtgcgattgtgttcgcgcgctacggcaccttcggcgatgcgctggaagatcgggcggaaacgtgccgccagcgtggggtagtcgacgccgatggacagcgggttgatgacgtgatgttcggtcatggcgaggttcctgggcagtgatcgatgcagaggggattgcacagtccgtgccgggttccggggtgcgtatttacggggacaaacgtcgagttactgttgccctggcaacagcggatcgacaaaccgacgcaatccaacacactggcgatggtgccgggtatcaggcccaagccgcctggtctgggcgtttccccagcctggcacgcttgctgctcaagccctcgtacatcccttttgtacgaggtaccgtccgatgactcaacacgccgtgaaatttgcctactgggtgcccaacgtcagcggtgggctggtggtcagcaaaatcgaacaacgcacccactggggcatcgattacaaccgcaagctggcgcaactggccgaggctgcaggcttcgagtacggcctgacccagatccgtttcaccgccggctacggcgccgagaaccagcacgaatccgtggcgttcagccacgcgttgctggccgcgaccaccacgctcaaggtgatcgccgcgatcctgcccggcccgtggcaaccggcgctggcggccaagcaattggcgaccatcgaccagctcacccatggccgtatcgcggtgaatatcgtcagcggttggttcaagggcgagttccaggccattggcgaacactggctggagcacgatgagcgctatcgtcgttccgaagagttcatccgcgccctcaagggcatctggacccaggatgacttcaccttcaagggcgacttctaccggttcaacaattacaccctcaagcccaagccactgggccagccggaagtgttccagggcggcagctcgcgggcggcgcgggacatggccgcgcgagtgtcggattggtacttcaccaacggcaacaccccggaaggcatcaaggcccaggtcgatgacatccgcgccaaggcggcggccaataaccactcggtcaaagtcggcgtcaacgccttcgtgatcgcccgcgacaccgaggaagaagcccgcgccgtgctggccgagatcatcgacaaggccgacccggaagcggtgaatgccttcggtgatgcagcgaaacaggccggcaaggcgtcgccggagggcgagggcaactgggccaagtccagcttcgaggacctggtgcagtacaacgatggcttcaagaccaacctgatcggcacgccgcagcagattgccgagcgcatcgtcgcgctcaaggcagtgggggtggacctggtgctcgcgggcttcctgcacttccaggaagaagtcgaatacttcggcaagcgcgtgttgccgctggtgcgtgagctggaagccaaggcggcaatcaaacaggtggcttgatccgtgcaagcttgatccgtgcaagtagtgagcgggcttgctacaggtgtttttccaggcgaagggcgggagtgtggtcttcgtagtagtcgttgatcagggcaaagcgccgataaccgttgcgctcatagaggttgagggcgccggggttgtcggtgcgtacttccagacgtatgcaggtatagccctgtgccactgcgatagcttccacgtcgttcagcaactgcttgcccaagccaatgccgcgtgcatgctcggcaatggcaatcgaatacaggcgcgccgagcaggcgccccgacgaaataacaccagcgcatagccgagtaactgccggtcattttccgccaccagcaactggccgtgggcgcggctgaccatccactggaaactgcgcgatgacagccggtcgctgctgaaacagcgctgttccagtgccaccagttcagacacatcgttggaggttgcaacgcgaaagcaaagagccatatgaccgccgtaaaagttgtgtaacgaaacgggacttctctaaatgatcgtgcttaatagaaaaggtcgagttctctaaagcggatcaactattatgtcggcggtacaaggtcattggcgtgaagtatcggagcaaacagtcgcgacgacaataactgataaaggttatttttctgccgcactcaaaggaacccgtcaagtcgtgattattgtcgagcgcaaggaagattgggcctcctacttccccagcgaagacatcgtcaccgcccaggaatacctggaacagacccgggaaaccgagaccggcaagcgggtgcaggtgatcaacctgtgccgcagctacaagtacctggggcacggttactactgctcgctgctggccgaagcccgtgggcacaaggtgattccgtcggtgcgcaccatcagcgaactgaccaagaagtcgctgtacggcctggccctggatgacctggataaaaccctcgataaagccttgagtcatcatctttacagcaataccgaaggctttaccctgacactgtattttggccggaccaatatagagccgttgcaggacctggcccgtcagttatttgaagcgttcccgtgtcccatcctgttagttgatttcaaaaggagtaacggctggcatatcgaagggatcaagtccggtgtattgcacaagttgcgcgatgaccaggaagatcaattcgcccatgcgctggacaacttcagccgcaagatatggcgccagccgcgctcacgtcgcctggcccgttatgacctggccatcctgcacgatccccaggagcaattgccgccgtcgaatgccaaggcgttggacaatttcatccgcgtgggcaggggcctgggcatcgatgtggagttgatcgagcgcaaggactattcgcgcctggccgagtacgacgccttgctgatccgcgagaccaccagcgtcgacaaccacacctaccgcttcgccaagaaagccgaaagcgaaggcctggtggtgatggacgacccggcgtcgatcctgcgctgtaccaacaaggtctacctcaccgacttgctcaacagccaccaactgggcatgcccgccaccgaaattctgtacaaggagcgaccggaagacttcgagcgggtcggcgagcgcctgggcttcccgctggtgctgaagatccctgacggttgcttttcccgtggcgtgatcaaggttgaaagccaggaagccttgctcaaggccaccgccgagttgttcgagcattcagtgctgttgctggcccaggaattcttctacaccgaatacgactggcgcatcggcgtgctcaaccgcaagccgatcttcgcctgccagtacttcatgtccaagggccattggcagatctacaaccacaaggccatcggccaggccatcaacggcgaatgccgcaccctggcggtgcatgaagcgcccagggcggtggtcgagttggcagtgaagaccgccaacctgatcggcgatggcctctacggcgtcgacctcaagcagtccggtgacaaggtggtggtcatagaggtcaacgacaacccgaacctggatgcgggcatcgaggacgcctacttgcaggacgacctgtatggcctggtgctggaggagttcgtgcggcgcctggagttgaagcgtcagggccaggtctggtgacccggcgatgatccagcgtttcgagctgatcgatggcaagctgcagggcggggagagtgacgcagccccgatcatgctgttcaacaaccctgacctggccgaacgtgggtggctgcgcgaccatcacaaactggatgaacacgccctggcctcggccctggacccggatgaagtctcgcgtatcgagtttcaccccgacaatctgttcctgatctggaaacgccccgagaactactccggcggcggcaacctagtgttcgaagtgtcgtcctgcggcctgctgttttcccccagccgcctgctggtgatcgccaccgacgaaaccccgctgaccggcctgggcaagcgccgtccgctgcacacgccgctggatgtgctgctcgacctgctgctcaacaacatccaccattacctcggtcatctcaaggtgatcaagctggtcgcccgcgagctgcagcagcagttcaatgcgtccatgagcaaccaccacctgatgcagatgttcagcctcagcgaaagcctgatctattacatcaacgcgctgcacagcaacggcgcggtgttgtcgcggctgcgcaaccacgcagagaaggagcatttcagcgctgagatcattggcttgatcgatgacctggtcatcgagaaccaccagtgctacaaacaggcggagatctattccaatgtgttttccgggctgatcgacgcgcgcggcaacctgatgaacaacagcatgaacaacctgttgcgcaagctcacgctgatcaacgtggtattcctgccgctcaacctgattgcgagtatcggcggcatgtcggagttcagcatgatgacggcggggacgccgtggtgggtgtcgtatccactgttcttggcggcaatgggagtgggcggtgggttgatggtcctgggcctcacgcgcatcaaattgtaggcgctggcgtcagggggagggttgcaacgtcaggacctcaaagccgtccgccgtcaccgccaccgtatgctcccactgcgcggacaggctgttgtccttggtcaccaccgtccacccatccttcaagctgcgcactttcgagctgccctggttgagcatcggctcgacggtgaacaccatgccttcgcgcaataccagcccggtaccggggcggccgaagtgcaggacctgcggttcttcgtgcatctcgcgcccaatcccgtggccgcaatactcacgcaccacgctatagccgttggcctgcgcatggctctggatcgcatggccgatatcccccaggcgcgcgccgggcttgacctggcggataccggcccacatggcttcaaaggtctgctccaccaggcgccgggccttgggcgcgacgctgccgatcatgtacatcttgctggagtcggcgataaatccgcctttttccagggtgatgtcgatgttgatgatgtcgccgtccttgaggatctccttggcgctgggcatgccatggcacaccacctcattgatcgaggtgttgatgcagaaggggtagtcgtactggcccaggctcgccgggcgggccttgaggtcattgcggatgaaggcttcgacggcggcgtccagctccagggtggagcggccggcggcgacgaacgcatcgagcatgctgaagacctgggccagcaggcgcccggactcacgcatcacggccagttgtgcggcagtcttgatcatcaactgcgcccccggatcaggtcaggtttgtccagcaacagtttgttgatcaactcgttgtagggcagctgggggttgagctcggcgagcaggccgatcttgatccagaattcggcctgggcgttgatggagcggtccatcgcggcgctggccaggcgcagttgttcgtgcagttggtcggtgatcttgacgatgcccatggtgttcactgtgctgggttgatatacaaagcgtatatgtttcgtatatagggcgtaaacccccggccgctaaatggcgtaaggccattgacttgggcgcgggccgccggttagtttcgtgacatgacctttcaaacctttcgcagccagccaagcattattaccgccattcctcatttggcgggatagcgcacggctctacccaaacccgcccttgaggcgggttttgtttttccgtctcccgggccctttacaaaaagccaggagacagccatgagtacccgccccgagaccgccgacacgggcttgcttgaacagtatgtgaagaagatcctcgccgccccggtctacgacctggcggtgcgcacgccgttgcaggtcgcgcccgcgctatcggccttgctgggcaaccaggtgctgctcaagcgtgaagacctgcaaccgaccttttctttcaagatccgcggcgcctacaacaagctgatgcagttgagcgacgcgcaaaaggcccggggcgtggtcacggcctcggcgggcaaccacgcacaaggcgtggcgctggcggcgcgggagctggggatcaaggcgcgcatcgtgatgcccgccagcaccccggaactcaaggtactcggcgtgcgctctcgcggtgctgaagcggtgttgcatgggcagagtttcccctttgccctggcccatgcgttgcaactggccgagtcatcccgcgccaccttcgtgtcgcccttcgatgacccggatgtaattgccggccagggcaccgtggccatggagatcctgcgtcaacaacagggcgcgttggacgcgatcttcgtgcccgtgggcggtggtggcctgatcgccgggatcgccgcctatgtcaaatacctgcgtcccgaggtgcgcatcatcggcgtcgaacccgaaggctccagctgcctgttggcggcgctgcaagcgggggagcgggtggtgctgcccagtgtcgacgggtttgccgacggtacggcggtggcgcagatcggcgcctacgggtttgaaatctgccgccattgggtggatgaagtcatcaccgtcagcaacgacgaattgtgcagcgccatcaagttgatctatgacgatacccgttctatcaccgagccttctggcgcattggcggtggcgggtgtgcgcaagtacgtggcaactagaggcgtacaggggcagaccctggtcgcggtcaattcgggggcgaatatcaacttcgatagtttgcgacatgttgctgaaagagttgcggcgcaaagcgcaagttcagggttaaacgtttaatcgcagccaatcgacgacgatttaaacaacgctgctttacttatataacccggcccatcgcttatgaggaaaggttacaacgatggccgattttgccgagtaggcttgggtgttacaagcgtcttccagggtcggcaagacgcagcgggcgagcgcccgtgggtttaataacaatctgttggcagtctcagaaaaggagaggttgaccatgctttcggaattagaacttcgcagcattattgaaggaagtttcctgcccaaacggtgcgaatgcaccaaagccgaagatgcttcgctgacgatcaaggtctacgacgaccatgaccgtgaccgggtggatttggaagtcaaaggcatcaacgccgataaactcgacagcagtcgggccatttgcaacttgatcaccgggttacgtgaagatctcaagcacgcccatacccctatcctgcaacgtgcaggaggacgggcttactgaatacttgaatgttgaaccgtgggcctggtgattgccaggcccagtgctgtccagtcagttctggaagtcgcaggcgtcggacatcttccgatagctcacgtcttcgactttgccggccttgtccaaaaacttgatatccgccttgatgactttgcattcatcggtcggggtttcgttcatggccaggaccttgtcaatgttcatcggcaggccgtagtggtagggcacgggtttgacagtggcgacttgatcgtcggcctgggccaggcctgacacggctgccagcgccaggctggcgccgagcattaaggtgcgcagtttcatggtgttgctccgcaagtgggtaccacttcactgtcgacttgcgggattaaccatcgattaatgtttagttggctgacaaaatcttcatccaagctgctggcggtagggcaggtccgggccggtcttggtgcaggtcagcgccgcggcgcggatcgcaaagccgagcatggcgtcgatctgtgcaagggtcagccgttgcaggccgtccaccgaatccagctgctgctcggtcagccaggcgatcagcgcggcctggaaggtatcgccggcacccaccgtatcggccatcaccaccttgaccgccggcgcagaccaattgccgtgctggcggctgaacacgctggcgccgtcaccgccacgggtgaggaacaccaattggcaacggtgttgcagccagccctgcagcacgctttccggcgattggtccgggtagagcaaatgcaggtcttcgtcgctgaccttgatcaggtcggcatgcttgaccagttcggccacgcggtcgcgccacagttggatatccggctgcgggttgagacgcacgttggggtcgaggctgatcaggcgcttgccgctttcgcgcttgaccaggttcagcagcgtgtcgccgatcggttgcactaccagcgagaacgaaccgatgtgcaggccgcgaatatcatcgcccagggcaggtagatgggcgatttccagcagccggtcggcgcagccttcgccacggaagttgtactgcggtgaaccatcggcgcccacggcgaccatcgacagggtggtcggtgcggcgaactccaccaggaactgctcgctcacgccttcatccttgagcacctgcaataagcggcggccaaggaagtcggtggacaagccgccgaacaacccggcctcgatacccaggcggcgcaggcctaccgccacgttgaacggcgaaccgccggcaatcgccttgtagttgaccttggaggcctgcccgctggcatcttcctcgctgaagaaatcaaacagcgcttcaccacacaccagatacatagtcgttcgctcttaaagggttgccacgagttgttgatagcgctcgtaagcctgctggtaggcgcccacgctggccgccaccggcagggtccggctggcggggtcgacgcttacgcatttgtcgcaaaggctggccagcgcttcgccggactggcaccacgccgcctggatcgccgcgcccagggcggcggcttcgctttgttcggtgcagatcacttcggtgttcatgatgtcggcgaccatctggcgccataccgggcttttcgaaccgccgccgatcaagcggatgctctggctttgcaggccggtctcgcgcagcaggtcgaggccgtagcgcaggccgaaggtggtgccctcgaccacggcgcggcacaggttggcgcgggtcaggttggtcatggtcaggccgtgcaggctgccggtggcgtggggcagggcgggtacgcgttcaccgttgaggaacggcagcatgcttacaccgtcggcgccaattggagattgctcgaccagggcgttgaacgcggccaggtcgaggtcgaacagctcgcggaccaccccggtggcattggtcaggttcatggtgcagatcaatggcaaccagccgccgctggatgagcagaaggtagcgaccgaagcctgcgggctgacgttgggttggtcggcaaacgcatacaccgtgcccgaggaccccaggctcatggtgatcacgccaggcgcgatattaccggtgccgatggcgcccatcatattgtcgccgccgccgctggaaacgatggcattggggttgatgcccaagcgttcggcgatggccggcaggatcgtgccgacgctttgattcgcctcgatcaacgctggcagcgccgcttcaaggcggccgctggggtcgatgtgcttgagcaggtccacatcccattcacggctgcgcacattgaagtagccggtgcccgacgcatcgccatactcggcgacggcacggccggtgagccagtagttgaggtagtcgtggggcaacaggatatgcgcaatgcgcgcaaacaggtccgggtgctgttcgcgggtccacagcagtttcgacacggtgtagcccggtgcaatcgccacgccgaggcgttccagcgagacgttctcaccgcctagatcggccagcaggcgctcgttttcaggcgtggtttcggtgtcgcaccacaacttggccgggcgcaacacctcaccgtgttcatccagcagcaccaagccatgttgctgcccggacacgccgataccgaggatgtcctggccgtccacaccggcctgttgcagggcgcggtgggtggcttcggtgaaagcgtccagccattcctgggtgtgctgttcgcggcggccgttggcgccgctgatcagggtgtgcgccgcagcgccgaggccgagtaccttgccgctggaggcgtcgaggacgatggccttggtgccttgggtgccgcagtcgatgccgagaaacaggttttgctgggtcatgagggtgtgctcagcagtttattgttcgagttggccatgcattccaatgtgggagggggcttgcccccgatagcgctgggtcagctaaagatgcatcaactgacactccctcatcgggggcaagccccctcccacatgtttaggtcggtttcttcaggagttgctgcagtgttttggtcacgccgttatcgcgcaagctcacataacaccgctcgaacgctgccacaaactcagccgacttgggaatagccgtgccaaaaatctcctccacccccagcaggcgtttgctgatcaatgcatcctcactcaccagcccctggcagaactcggcgcgcggatccgggatcttgtagctcacgccattctcatccacgcccttgaggtaaagcgcccaagcggccaccaccagcgccgcacgctcggtctcgcgcccatcggcaatcaagcgattgatggtcggtacggtgaacttgggaaacttcgacgagccatcggaacacacgcgttccaattgatcggcaatcgcctggttggagaagcggtcgaccaatgtctgcttgtattgcgtcaggtcgatgcccggcaccggcgccaggttcggcgtgacgtccaggtccatgtaggcgcgcatgtaggccacgaacagcgggtcattcatggtctcgtgcacaaaccgataacccttgagaaaccccaggtaggtcaacgccaggtggctgccgttgagcaggccgatcttcatctcttcatagggcgtaacgtcatcggtgaactgcacgccgaccttttcccaggccgggcgaccgttgacgaatttgtcttccagcacccactgcacaaagggttcgcacaccaccggccaggcatcgtcgatgccgtgctcgtcgtgcaattgcaggcggtgggcggtgctggtcatcggcgtgatgcggtcgaccatggcgttgggaaagctcacattggccttgatccagtcgtgcaactcggcgttgtgcagggcggcgaaggccagcagcgccttgcgcgtcacggcgccgttgtgcggcaggttatcgcaggacatcacggtaaacgccggggtgccggcggcgcggcgctgggtcaacgcggcgcagataaagccgaacacggttttcggtgcgctcggctgcgccaggtcgtgctggatctgcggcaagtgggccatgaactcgccgttgctgtcgtcgatgcagtagccgccctcagtgatggtcagcgacacgatgcggatggccgggtcggccagtttgtcgatcagcgcctgggcgccgtcttcggccagcagcatggcgctgatcgagccgatcacccgcacttcggtgtcgtcggtatcgcccagttcgtacagggtgaacaggtagtcctggccagccaggtcgtcgcgggccttgcggtcctcggcgcgtaggccgacgccgcagatgctccagtccaacccttcgccggtgttcatcagcgcatcggtgtaatacgcctggtgcgcacggtggaaaccgccgacgccgatatgggcgatgccctgggtggtgctggcaatcgcatagctgggcagcttcacttgcgatgccagctgggtgaggttgtgtttattcagtttcatcagctcaatctcgcgaaatcaggcggcagcgcgcagtgggcgggccacggccacgccatcggtgtcgaacagatggcagtgcgccgggtccaggtacaggtgcagcgtctcgccgtactggctggccatgtcgccacggatccgcatggtcagcggctcgccattggcggtgatgacgtggcagaaggtgtcgctgcccaggcgctcgccgacgtcggcggtgacggtcagggtggtttggccgggcgtggcgatttccaggtgctccgggcgaatgcccagggtcaccgcgctgccgacgcgcaggctggcgctgctcaacggcaggctgatgctggtgccggcgtccagttgcacttcgcagccctggccttcgacacgggtgaccgtgcccttgaggaagcccatcttcggcgtaccgagaaagcccgccacgaacaggttggccggctggtggtatagctccagcggcgagccgacctgctcgatacggccactgttcagcaccaccactttgtcggccagggtcatggcttcgacctggtcatgggtcacgtagatcatggtcgcctgcagctctttatgcaggcgcgccagctccaggcgcatctgcacgcgcagcgcggcgtcgaggttggacagcggttcgtcgaacaggaagatcttcgggttacgcacaatcgcccggccaatggccacacgctggcgttggccgccggacagttgcttgggcttgcgctccagcagcgggcccagttccaggatgcgtgccgcttcgctgactttgctttccaccagcttcttgtcgaccccggccaggtccagggcaaacgacatgttcttgcgcacgctcatgtgtgggtacagcgcataggtctggaacaccatcgccaggtcgcgcttggccggggtcacttcggtgatgtcgcgcccgtccagttcgatggtgccttcgctgacttcttcgaggccggcgatcaggcgcagcagggtggatttaccacagcccgacgggccgacgaacaccacgaattctttgtcgttcacttccaggtcgatgcccttgatgatggaaaagccttcgaagcctttttgcagattcttgattttcaggttggccatgatgggcctccgctaggaattattatttaacggcgccgaaggacaggccgcgcaccagctgtttctggctgatccagccaaagatcagtatcggcgcgcaggccagggtcgacacggcggacaatttggcccagaacagcccttcggggctggagtacgaagcgatcagcgcggtcaacggcgcagcggcggacgaggtcaggttcagcgaccagaacgcttcgttccagcacaggatcagcgacagcaacacggtggaggccaggccccccttggcaatcggcaacagtacgcggaccatttcctgccacagggtcgcgccatccaggcgcgcggcttcgaggatgtccttggggatgtccttgaagtaggtgtaaaccatccagaccacgatcggcaggttgatcagggtgtagatgatgatcagcgcgatgcgtgtatccagcaggccaaaactcttggccagcaggtagatcggcatcagcacgcccactggcggcagcatcttggtcgacagcatccacagcagcgtgcccttggtgcgctgggtttcgtagaacgccatggagtaggcggccggtaccgagatcagcaggcacaaggcggtggcgctgaaggaaatcagcaccgagttccacgcataactgaagtagttgctgcgctcgttgatgtgcaggtagttctccagcgtcggcgtgaagatgaactgcggcggcgtggcgaacgcgtcgatttcggtcttgaagctggtcagcaccatccagaagatcgggaagaagatcaggatcgcgatggcccaggccagggtgccgagcaacaggctttgcaggcggcgggattgttgaagcgtcatggcgcggccctcaaggcttgtcagtcaggtttttgccgatcatccgcaccaggatgatcgccgcgatattggcgatgaccacggcaatcaagccgccagccgaggccatgcccacgtcgaactgcaccagcgcctggttgtagatcaggtaggcgaggttggtcgaggcgtagccggggccgccgttggtggtggtgaagatttcggcgaacaccgagagcaggaagatcgtctcgatcatcaccaccacggcaatcggccgggccaggtgaggcagggtcaggtgccagaagatcgcgatggcgccggcaccgtccaggcgtgcggcttccttttgttcctggtcgagggactgcatggcggtcatcagcaacaggattgcaaagggcagccattgccacgacacgatgatgatgatcgacagcaacgggtagtgcgccagccagtccaccggctcggcaccgaacagcttccacacggcggcaagaatccccgacaccgggtggaaaatcaggtttttccagatcagcgcaccgacggtgggcatgatgaagaacggcgagatcaacaacacccgcaccaggccacggccgaagaactcactggcctccagcagggcactgatcaacacaccgaacaccacgctgatcagcagcacgctgcccaccagcaacagggtattggtagcaccgggcaggaagcccgagtcggtcacgaaatacgtgaagttctccagcccgacaaactggttttcaccggggtagagcaggttgtagcggatcagcgaaaagtacagggtcatgcccagcggcacgatcatccacagcagcagcaaggccaccgaggggctgacgaggaaccagccggggttggccaggcggtttttggcgggtgtattcatggtattcacgaccggtacagagcaagaatcggagtgcgatcagtgtgggaggggcggtgcgacgattcgacttgcccccgatagcggtgtgtcagtcacacattcatcaactgttagattgctatcgggggcaagccccctcccacatttgactgtgggtagggctggattacttggggtagcccgcccgcttcatttcacgctcggtggtggtctgcgcggcggtcaaggcttgatccaccgtctgctgaccggtcagcgcgcctgagaaaaacttgccgacctgggtcccaatcgcctggaattcaggaatggtcaccaattggataccgatatacggcaccggcttgagcgtcggcttggtcgggtcggcgactttcagcgattccagcgtcaccttggcaaacggtgcggctttcatgtactcgtcgctgtaggtcgacttgcgcgtgcctggtggtacgttggcaacgccatcggtcttggcaaccaaagcgccatattccttggaggtggcccagctggtgaacaccttggcggcgtccttggccttggaactggttggaatggccaggctccaggagtacaaccacgacgtacctttgtcggtcttctcatgaggggcaaaggtgaagccgacatggtcagccactttgctctgggtcttgtcggtgacgaacgagccggccacgctggcatccacccagatcgcgcacttgccgctgttgaacagcgccaggttttcattgaaaccgttgctggaagcgcccggcgggccggatttcttcatgttgtcgacgtagaagttcagcgcatccttccattcagggccgttgaactccggttgccatttctcatcgaaccaccgcgcgccgtagccgttggccagggtggtgatcagcgccatgttttcaccccaaccggctttgccgcgcaggcacaggccgtattgctctttggtcttgtcggtgagtttgctggcgaattcgccgatctgggtccaggtcgggtgctcgggcatggtcagcccggcgtccttgaacaggtcggtgcggtaataggtgatcgagctttcggcgtagaacggcagggcatacagcgagcctttcacggacaaaccgtcacgcactgaagggaatacatcgtcgaggtcgtaggacgccggcagatccttcatcggctccagccaacccttggcgccccacagtgcagcttcgtacatgccgatggtcaatacatcgaactgcccaccctgggtggcgatgtcggtggtcaggcgttgacgcagtacgttctcttcgagcaccacccagttcagcttgatctccggatgctcggcctcgaaggttttcgagagcttttgcatacggatcatgtcgctgttgttgacggtggcaatggtcagggtctgcgcgccaaggctgacggcgctgatagtcaagcaggtagaggcaagcagaacttttgctgtgaatttcatcgcgcactccgtttccgcgcccagggggctacagaaggacagttattgttgttgtgtcttcccacgagctgtcaggaagagtgtgcgttgattacagccttgaaatggggttgtgacaaatccttgggcgcactggcactgatacttttttgcactcgggctcaagccggctgaaactattaagccaggttctgttcggtgagccgctgcaccgccaggcgccggtagtgggaaggggtcatgcctttaagctgctggaagcgtcggttgaagttggaaatattgttgaagcccgactcgaaacacacatccgtcacggctttatccccatcggccaacaactcgcaggatttgctgatacgcaaacgattgacgaattcgatgaacgtacgcccggtagcctgtttgaacacgcgtgagaagtaagtcggcttcatccccaggtattccgccacttcctcaagcggcaactcgcgcgcgtagtgcgcaaaaatgtaatccactgcacggttggtgcggtcgatgctgtgttcatcggccagttgcggcgtggtcacaccggacagcagttggtagtcctcgcaggcgctcaatacttccagcaggataaagaagtgccccaggcgcgccatgccctgggcgtcctcgatgcgttgcatcagggtcatggcctgggcgatggtctttttgcagcgaaactcgatgccgtactgcgcgcgttccagcagtggtgccaggcttttgagttcggcgaagatgtggctgccgtgctcgaacagttcatcggtgaaattcaccagcatgtcgcgcttgggcaccacctcgtcttcgtccacctggctgatccagttgtggggcaggttggggccggtgagaaacaggctttccgggtagaagttgccgatatagtcgccgataaacaccttgccggagctggcgacgatcaggtgcagctcgtattccttgtggaagtgccagcgcaccagcgggcaagggaaaccgtgttggcgatagatgatggacaggccgttgtggtcgtccatcagttcgtaggaagggtcggtgatgcgcgctgctcgggtcatgctgccgccgctttattgtggttgctgcgtaggataatgcccccttgcgcacgacctcgccagcgtcgatgtttatacgttgcggttttttgcctcgatccactgcgacatgtactgggtacttttatgggcgtggtggcgcagcatgctgccagtgaagttatcgcgtcgatgggccgcgaggtgttgacggcactgctccaggcaggccaccagcgccgggccgtggatgtcctggtcataccgccgggccagcagttggcgaccgtcttcctgggcctgggtccagcgttcacggtcttgatacaacgccaccgccgccgccgcgagggcaggtgcgctctgttctactgcgccaggccatggctgttcatcccccatggcctcggcgccgattggggtggtgacgtttggcgtgccgcagagcattgcatctgccagcttgcccttgatcccggcgccgaaccgcaacggtgccaggcagatgcgcgccgccgtcatcacttgcaaggcgtcttcggcccagttcatcacatgaaacccttgtgccgggttatgcaaggccgtggctttgggcggggtgtaggcgccataaatgtgcagttgcgctcccgggagttgctggcggatcagcggccacaggctgtttttcatccagagcaccgcatcccagttgggggcgtggcggaagttgccgatgctgaggaaatgggcgcggtcttcaaatggcgcgaagggctcggtcggccgctccagcatcagcgggcaccagtggagcagggcgggcggcaccttgaagtgctcggtcagcaggcggatttccacgtcggagatcatcaggctgatgtcgcagcggtaaatcgccgcgatttcccgtttggccaggtcggtctcggccattagtcggaactcttccggaagtgccgggcagaacaacgcgctgaagtcctcggtgtcgggatgcgccttcaggtgatccttgacgcgttggtgacgggcatcgcgcaagctttgcaggtcggaggtttccaggacacgcagggcgcctgggcagcatttttcgacgcgccagccgaactgctcctccatcatgaaacggtcgaacagcacgatatccggggccaactcgcgaataaaatcatcgaaactgcggttattgagttcgatggcgcattcggcgatgcccagcgcaggcaaatcggccttgtgctcgccgacggtcgcggggctgctgaaggttatgtcccaaccttgtgtaagaaagctctgaagaatctgcatcatgtgcccgcctgcggccgaggaacacggctccggccagacataaccaatgaccaggactttggtggcaggctgattcatcaacaacaggttccttgaagggcagggcgatcggcgcgcaattaaaccataaccggcggcatgacaatttatgtctggcggtaggtagccatcgcactttgtggttaacttccgcctctcgaattcgtttcatcaaacccagcataaggattctgttcatggctcaagtcacccttcgtggtaatcctgtccaggttgaaggcgaactgccgaaaaccggctccaccgctcccgagttcagcctggttgctaccgacctgtcgcaagcgaccctggaaaccttcgccggcaagcgcaaggtgctgaacatcttcccaagcgttgacaccccgacctgcgcgacctcggtacgcaagttcaacgcccaggccaacgacctgagcaacacggtcgtgctgtgcatttcctctgacctgccgtttgcccagaagcgtttctgcggcaccgaaggcctggacaatgtgctgagcctgtcggacttccgcaacgccgacttcgctgtcgactacggcgtttccctcgccgacggcccactgcagggcctgactgcccgcgccgtggtggtactggacgagaacaacaacgtgctgcacagcgaactggttgcggaaatcggccaggagccgaactacgaagcagccctggctgttttgaagtaactgtttcggtacgttactgtcgttttgcagtaacacgcttgatgcatgattgcggcctggcctagtccaggccgtttttatttgtgcctcaactgcttagcgaaatagcgggcagactaagatcagcagttaaaagttgtaagcccaaggtaaatagccggtaaaggcgcttttctaaatgcgccccagtgcttatctttcagcctcccaaagaagaagctctcgcgcccaatggttgatcactccatgcaatcctccccccgtaaatcccgccgctggctgttcggcctgctcgtgctgctggttatcgccggcctgtgctggaaattctggcccggcagccataaggatggcgccgaaaagcctgcgggccatgccggcaagacggggatgatgcgcccggggttcggcggctcggccggcccggtgccggtgcgcgtggccccggccgtgctgggagaattcccggtgtactacaaggcactgggcacggtgaccgcgctcaataccatcaatgtgcgtagccgggtgggcggcgagctggtgaagatcgcctttgaagaaggccagatggtcaaggccggcgacctgctcgccgagatcgacccgcgcagctaccagaacgccttgctccaggcccagggcacgctgatgcagaaccaggcccagctgaaaaacgcccaggtcgatgtgcagcgttaccgcgacctgtacgcccaggacagcatcgccaaacagaccctggacaccgccgaagcgttggtcctgcaataccagggcacggtcaagaccaaccagggcgcggtggatgacgccaagctcaacctcgaattcaccaagatccgtgcgccgatcagcggccgcgttggcctgcgccaggtcgacgtgggcaacctggtggcggccaacgacaccaccttcctcgcggtcatcacccagacgcaaccgatcagcgtggccttcaccctgccggaaaacaccctggaaaccgtgctcacccgctaccacgccggcaacaaactgccagtagaggcctgggaccgtggcgacgtgaagaaacaggccactggcgtgctgcagagcctggacaaccagatcgacgtcaccaccggcaccctgaaattcaaggcgcgtttcgataacaaggaccaggcgctgttccccaaccagttcgtcaatgtgcacctgctggccgacaccctgcataacgtggtgctggcgccgtcggcggcgatccagtttggcaacagcggcacctttgtctacgtgctggacggtgacaagaaggtcaagatgcagcccctggtggtcggcgataccgatggcgacaacaccgtgatcaaagagggcctcaaggcgggcgaccgcgtggtgctggaaggcaccgaccgtctcaaggatggcagcgagatcgaagtggtcaacgacagcagcgaagtgccgaccaccccgaccgaacacctgcaaggcaagcctgcggccaaaggggagaccggcgccaccgccggcaaggcgcaaaaggtcggttcatgaacctgtcgcggctgtttattcttcgcccggtagctaccacgctgagcatgctggccattgtcctggccggcatcatcgcgtaccgcttgttgccggtgtcggccttgccccaggtggattacccgacgatccgggtgatgaccctgtaccccggcgccagcccggacgtgatgaccagcgcggtcaccgcgccattggagcgccagttcgggcagatgcccggcctgacgcagatggcctccaccagttccggtggcgcgtcggtgctgaccctgcgtttcaacctcgacatcaacatggacgtcgccgagcaacaggtgcaggccgcgatcaacgccgccaccaacctgttgcccaaggacctgccggcgccgccggtgtacaacaaggtcaacccggcggataccccggtgctgaccctggcgatcacctccaagaccatgctgctgcccaagctcaatgacttggtcgatacgcgcatggcgcagaaaatcgcgcagatcagcggcgtcggcatggtcagcatcgccggcggccagcgccaggcggtgcgcatcaaggtcaacccggaggccctggcggccaacggcttgaacctgtccgatgtgcgcacgctgatcgctgcatccaacgtcaaccagcccaagggcaatttcgacgggccgacccgtgtgtcgatgctcgatgccaacgatcagctagtctcgcccgcgcaatacgccgaactgatcctggcctacaacaacggcgcgccactgcgcctcaaggacgtggcgcagatcgtcgacggcgccgaaaacgaacgcctcgccgcctgggccaacgaaaaccaggccgtgctgctgaatatccagcgccaaccgggcgccaacgtgatcgaggtggtggaccgcatcaaggcgttgctgccgagcatcaccgacaacctgccggccggcctcgacgtgacggtgctcaccgaccgcacccagaccatccgcgcctcggtcaaggatgtgcaacacgaattgctcatcgccatcgccctggtagtgatggtgacgttcctgttcctgcgccgggtcagtgccacgatcatcccgtccatcgccgtgccgctgtccctggtgggcacctttggcgtgatgtacttggccggattctccatcaacaacctgacgctgatggcgctgaccatcgccaccggctttgtggtggacgatgccatcgtgatgctggagaacatttcgcgctatatcgaggaaggcgaaacgccgctggccgctgccctcaagggcgccaagcagatcggcttcaccctgatttccctgacgctttcgttgatcgccgtgctgatcccgctgctgttcatggctgacgtagtcgggcgcctgttccgcgaattcgccataaccctggcggtggcgatcctgatttccctggtggtgtccctgaccctcacgccgatgatgtgcgcgcgcttgctcaagcgtgagcccaaggagcaagagcaaagccgcttctacaaggccagcggcgcctggatcgattggttgattgcgcgttacgggagcatgttgcagtgggtgctcaagcaccagccgctgaccctgctggtggctatcgccaccctgggcctcaccgtattcctgtacctggtggtgcccaaggggttcttcccggtgcaggacaccggcgtgatccagggcatttccgaggcgccgcaatcaatttccttcgccgccatgagccagcgccagcaggaactggccaagatcatcctggccgatcccgccgtggaaagcctgtcgtcctatatcggtgtggacggcgataacgccaccctcaacagcggccgactgctgatcaacctcaaggcccacggccagcgtgacctgagcgcggcccaggtgatcacccgtttgcaaccggaaatcgacaagctggtgggcatccgcctgttcatgcagccggtgcaggacctgaccatcgaagaccgtgtgagccgtacccagtaccagttcagcatgtcctcgccggacgccgaactgctggcgttgtggagcgacaagctggtgcatgcgctcagtcagttgccggaactcacggatgtggccagcgacctgcaggacaaaggcttgcaggtgtacctggtgatcgaccgtgatgcggcctcgcggctgggtgtgagcgtgtcgaccatcaccgatgcgctgtacgacgccttcggccagcggcagatttccaccatctatacccaggccagccagtaccgcgtggtgttgcaggcccagtccggcgaaacccttgggccggacgcgctgaaccagatccacgtgaaaaccaccgatggcggccaggtgcgcctctccagcctagcccacgtggaacagcgccaggcgcagttggcaattgcgcatatcggccagttcccggcggtgatgatgtcgttcaacctggcccccggcgtcgcgctgggcaaaggcgtggagctgatcaaccagacccagaaagacatcggcatgccggtgggcgtgcaaacccagttccagggcgcggcccaggcgttcgaagcgtcgctgtcgagcaccttgctgctgatcctggcggcggtggtcaccatgtacatcgttctcggtgtgctctacgagagttacattcacccgatcaccattctctcgaccttgccatcggcggcggtaggggcgttgctggcgttgctgctcagcggcaatgacctgggcatgatcgcgatcatcggcatcattttgttgatcggtatcgtcaagaaaaacgcgatcatgatgatcgacttcgccctcgacgccgaacgcaaccagggcctcgacccgcagactgcgatctaccaggcggcgctgctgcgcttccggccaatcctgatgaccaccctggcagcgttgttcggcgcggtgccgttgatgctggccaccggttccggcgcggaattgcgccaaccgctgggcctggtgatggtcggcgggctgctggtgagccaggtgttgacgctgttcaccacgccggtgatctacctgtacttcgatcgcctcggccgccgctggcgcaaagagccgcaaagcctggagccggttgagtcatgaacctgtccggacctttcatccgccggccggtcgcgaccatgctgctgagcctggcgatcctgttgctcggcggcgtcagcttcaacctgctgccggtatcgccgctgccgcagatcgattttccggtgatcgtggtgtcggccagcttgcccggcgccagccccgaagtgatggcgtctaccgtggccacgccgctggagcgctcgttcggcgcgattgccggcatcaccaccatgagcagttcgtcgagccagggctcgacccgggtgatcctcgcgtttgactccgaccgcgacatcaacggcgcggcgcgggaagtgcaagcggcgatcaacgcctcgcgcaacctgctgcccagcggtatgcgcagcatgccgacctacaagaagatcaacccgtcccaggcgccgatcatggtgctgtcgctgacctcggacgtgctgcagaagggccagctgtacgacctggcctcgaccatcctgtcgcaaagcctgtcccaggtgcccggcgtcggcgaagtgcagatcggcggcagttccttgccagccgtgcgcatcgaactggaacccaaggccctcgaccagtacggcgtggccctcgatgatgtgcgcaacaccatcgccaacgccaaccagcgccgacccaagggttccctggaagacagcgagcgcaactggcagatccaggccaatgaccagttggaaaaggccaaggactacgagccactgctgattcgctaccagaatggcgcagccttgcgtctgggtgatgtggccaagatcagcgatggtgtggaagaccgctacaacagtggtttcttcaacaacgactcggcggtactgctggtgatcaaccgccagtccggcgccaacatcatcgagacggtgcgacagatcaaggcgcagttgccggcgttgcaggcggtgttgccgtccagcgtcaagctgagcctggccatggaccgctccccggtgatcaccgccaccttgcatgaagccgagatgaccttgctgattgccgtggggctggtgatcctggtggtgtacctgttcctgggcaatttccgcgcctcgctgatcccgacgctggcggtaccggtgtcactggtgggcaccttcgcggtgatgtacctgtacgggttctcgttgaacaacttttcgctgatggcgttgatcctggccaccggcctggtggtggacgatgccatcgtggtgctggagaacatctcccggcacattgacgaaggcgtgccgccgatgaaggcggcgtacctgggcgcccaggaagtcggctttaccttgctgtcgatgaacgtatcgctggtggcggtgttcctctccatcctgttcatgggcgggattgtcaccaatctgttccgcgagttttccatcaccctgtcggcggcgatcattgtgtcgctgattgtctcgctgaccctgaccccgatgctctgcgcgcgctggctcaaaccccacgttaaaacgcagatgaccggtttgcagcgctggagccagaagatcaacgatcgcatggtctccggctacgccaccagcctggactgggtgctacgccatcggcgcctgaccctgctcagcctgttgctgaccatcggcatgaacgtggcgctgtacgtggtggtgccgaaaaccttcatgccgcaacaggacaccgggcagttgatcggctttgtacgcggtgacgacggcctgtcgttcagcgtgatgcagccgaagatggagaccttccgcaaggcggtgctcaaggacccggcggtgctcagcgtggccggcttcattggtggcaacaacggcaccaacaacgcggtaatgctggtacgcctcaaacccatcagcgagcgcaagatctctgcccaggcggtgatcgagcgtctgcgcaaggacgtgccgctggtgccgggcgggcggttgttcctgatggccgaccaggacctgcaattcggtggcagccgcgaccagaccagtgcgcagtattcctacatcctgcaaagcggcgacctggcggcactgcgcctgtggtacccgaaagtggtggcggccctgcgcgagttgccggaactcaccgccatcgacgcccgtgaaggtcgcggtgcggcgcaggtcacattgattgtcgaccgcgaccaggccaagcgcctggggatcgacatgaacatggtcacggccgtactgaacaacgcctacagccagcggcagatttccaccatctacgacagcctcaaccagtaccaggtggtgatggaggtcaaccccaaatacgcccaggacccgatcactctcaaccagatgcaggtgatcacgtccacgggggcacgggtgccgttgtcgaccattgcccattatgagaacagcctggctgacgaccgcgtcagccacgaaggccagttcgcttcggagaacatcgccttcgacatggcgcccggcgtgacggtggagcagggcacggccgccatcgaacgggcgatcgccaaggtcggcttgccggaagatgtgatcgccaagatggccggcaccgccgatgccttcgcggccacgcagaagggccaaccgttcatgatccttggcgcgctggtggcggtgtacttggtgctgggcatcctgtacgaaagctacattcacccgctgaccattctctcgaccttaccctcggcgggtgtcggcgccatgctcgccatctacctgacgggaggcgagttcagcctgatctcgctgctgggcctgttcctgttgatcggggtggtgaagaaaaacgcgatcctgatgatcgacctggcgctgcaattggaacgcaatgaccgcatggggccgcttgaatcgatccgcagtgcttgcttgttgcgcttgcggccgatcctgatgacgaccctggcggccatcctcggcgccttgccgctgctgctgggtgccggcgatggcgcggaaatgcgccgtcccctgggcctgaccattatcggcggcctggtgttcagccaggtcctgaccctttacaccaccccggtggtttacctttatctcgaccgcgcgcgccatcgcttcaacgcctggcgcggcgtgcggaccgatgctgccctggacactgcgctatgaccgattcaacctttgcccgattggccctgttccggggctcccgcgtggcgagcctggtgctctgcggcgtgttgctcagcgcctgcgccgtcggccccgactacaaacgcccggacgtggtcgagccggcgcaattcaaggaagccaaggggtggcgccaggccacccccagtgattccctggcccgtggtgcctggtgggagttgtacggcgaccgccagctcaatgacctggtgctgcgcctgaacagttccaaccagaccgtggcccaggccgaagcgcgtttccgccaggcccaggcgttggtgcgcagttcccgtggggcgttttaccccaccgtcgacctgagcgcggggaaaacccgggccagccagggcaccggcagcagcagcgcgagcctgagcagttccagcagcggcattcgcgacaccctcaacgcacagttgggtgtgagctgggaggcggacatctggggcaagttgcgccgtggcctggaggccaacgaggccagcgccgaagccagctcggcggatttggcagcgatgcgcctgagccagcaatcggaactggtgcaaagctacctgcaactgcgcgtcatggatgaacagacgcgcctgctgcaagcgaccctggagacctatcagcgctccctgcaaatgaccgaaaaccagtaccgcgccggtgtttccggcaaggacgcggtggcccaggcgcaaacccagctcaagaccacccaggccagcctgatcgacttgatctggcagcgcgcccagctggaaaacgcaattgcggtgttgatcggcgaggcgccggccaacttcaacctggcggtcagcaaagacatcccggcactgccgcagatcccggtgagcctgccgtcgcaactgctggaacgtcgcccggacatcgcttcggccgaacgctcggtgatcgccgccaactccaatatcggcgtggccaaggcggcctactacccggacctgaccctgagcctggccggtggttattccagtagcacctacgccgactggatcagcctgccgaaccgcttctggtcggtggggccgaagctggccatgaccctgttcgatggcggccagcgctcggcggaagtcgaccgcaccgtggcctcctatgacgaaaccgtcgccaagtaccgccagactgtgctggatggtttccgtgaagtggaaaactacatggtgcaactcaaggtgctggaggacgaggcggtggtcagcaacgaagcgctggcggcagcacgcgagtcgctgcgcctgacccagaaccagtacaaggccgggctgattgcctacctggatgtggttaccgtgcaagccacggcgttgagcaacgagcgcacggtgctgaccttgctgcagacgcgcctggtggccagtgtgcaactgatcgccgccttgggcggcggctgggatggacagacgccgattgccgacaaaaattaacgatgaactcgatccaatgagcgggcttgctgtagtgagcgggcttgccccgcgctgagccgcgcagcggccccaaaaaacgggagcgctacgcactccagcgcggggcaagcccgctcaccacaataggtccgctcaccgccatatttgacctcagcaaaccctcgtttctgagccataggattggcgtcaaaatgccactaatggcgctctgataattaatcaactgttcaagaattattctcgctacaatcgcccgctttgccatttcgcacgggcctctcgggccctttgtgcacgagaagtcccatgctcatcggtagttattcgccctcactggtcgtgatctcactgttcgtcgcgatcctcgcttcctacaccgcgctggacctttccgggcgcatcgccaccgccaaaggccgcgccgtctatatatggatcattggcgggtcgatggcgatgggggtgggggtgtggtcgatgcacttcatcggcatgctggctttgcgcttgccgtttgccctgggcttcgacctggggattaccgcgctgtcgttgctgattgcggtgctgtccagcggctttgcattatggctggtcagccaaccgcgcctgccggcctggcagttggggttgggtgcgctgatcatgggcaccggcattgccagcatgcattacaccggtatggcggcgatgcgcatgacgccgggcatcgactacgacccgacgttgtttggcgcttcgttattgatcgcggtggtggcctccggcgcagcgttgtggatcgcccataatttgcgccgcaatacgccgtatgtgcgcctggcccgtggtggagcggcggtggtgatggggtttgctatcgtcggcatgcattacaccggcatggcagcggcccgctttgccgatgaaagcttctgcggcgcggcactgaacgggttgagcggcaagggtctggataacctggtgctggtcaccaccctggcggtgctggccatcgctttactgacttcgttgctcgacgcacgcctggaagcgcgcacggcggtactcgccgactccctgagccaggccaaccaggagctgacccacctggccctgcacgacatgctcaccggcctgcccaaccgcaccttgctcgccgaccgcatccagcaagccatgcaggcggtgaaagagcagggcggctgctttgcgctgatgtttatcgacctggacggcttcaaaccggtcaacgatgcttttggccatcatatgggtgaccagctgttgcgcgaggtcggcctgcgtctgcgtgaagacttgcgcagccatgacaccctggcgcgcatcggcggcgatgagtttgtgttgctggtgcaattgacccagccggacgacgccctcggccttgccgaacgccaagtggtgctgatcaaccgtgcgttccaggtggccgagcatgagctgaagatttccgccagcgtgggcatcgccattttcccaggcaacggcaacagcccccaggaactgctgatgaacgccgacgcggcgatgtaccacgccaagggcgtgggcaagaacggctacagctttttcgatgcgtcgatgaacaccaacgcgcgcaagcaattgcagttgttgcaggacttgcgcaatgccgtcgagcaacaacaattccgcctgtactaccagcccaagttcgacgcggccagtggcattgcggtgggcgccgaagcgctgttgcgctgggagcatccacagcagggcctgttgttgccggcaacctttatcgaactggcggaaaagaccgggttgatcatccccatcggggaatgggtactggatgaagcctgtcgccaaatgagcctgtggtacgcccagggctacgaagattggcgcatcgccgtgaacctgtcggcgctgcagttctgccacgccgggctggtcaagagcgtggccgaggccctggaacgtcatcggttgccggccaatagcctgaccctggaaatcaccgagaccaccgccatgagcgatgccgatgcgagcatgacggtgttgcagcagttgtcggacatgggcgtcgatctgtccatcgatgacttcggtaccggttattccagcctgatgtacctcaagcgcttgccggccaacgagttgaagatcgaccgtgggtttgtgcgcgacctggagcacgacagcgatgacgccgccatcgtctcggccattgtcgccctcggccaggccctgggcctgcgaattgttgctgaaggggtggagaccgatgtgcaacagagctttctcacgcgcctggggtgtaactccctgcaaggttacctgctgggccatccgttgccggcggacggattcatggccgacatccagcgtgccgaagacgcgcttgcgcctgacaaaagccgtgcgtgacgggtattcttggatccagccctaaacatcaggttgaatcaggagaccgcacgcatggacaaagtcgtcatcatcaccggaggcagtcgtgggatcggcgccgagacggcagtgctggccgctcgccagggttaccgcatctgcatcaactaccagtccgacgaagaggctgcccaccgtgtgctcgaacaagtccgcgcgctgggcgcccaggcgattaccgtgcgcgccgacgtgagcattgaagatgaagtgattgcgctgttccaccgcgtcgacaccgaactgggccgtgtcaccgcactggtcaacaacgccggcaccgtgggacacaagtcccgtgtggacgaaatgtccgagttccgtatcctgaaaatcatgaagaccaatgtgctggggccgatcctgtgtgccaagcacgcggtgctgcgcatgtcgcccaagcatggcgggcagggcggcagtatcgtcaatgtatcgtcggtggcggcgcgcctggggtcgcccggtgagtatgtcgactatgccgcctccaagggcgcgctcgataccttcaccattggcctatcaaaagaagtggcgggtgagggcattcgcgtcaacgcggtgcgccctggctacatctacaccgacttccatgccctgagcggcgacccggaccgggtcagcaaactcgaatccggtatccccatggcccgtggcgggcgcccggatgaggtggctgaagcgattatctggctgctgtcggacaaggcgtcgtatgccactgggacgttcctcgatctgggcggtggccgctgaagtccgggcattcatgcgcccaggtttcttagcacctcgtagccctgttccgcaaaggccaccagcaagcgtgcctccgagtttttacgggtggaatagcccgcattgtgaaaaccgttgattttgccatcgcggctttcgctgttgcccactgtgcggtcattcacgttatccagaaagttgaccacccgagccaggttgtaggctgcatcggcgcgcgaacgggcgctgggattcgcggaagtccagtcacccaattgacgtttgagcaggtcggtagtggggtagctgtctcggcgccgtaatagatgtttgaccgccggattggcgttgataatctgtttggcgctacggtggtcgccggatggtcgaccttccgggtggttgggagcattgcgccaattctgctccgtgaggtgtagggtgattgcagggctattgttggtgtacatgaggaactcggtatcaaggagaagtcactggttggcatcatgccgggttaggtcccagtgactgtgttacaactaaaacgaccgcacaatccgccccaacgtctccatcgccttttccgacgcctcggtccacgggctaccgtagttcaggcgaatgcagttcctgaagcgctgggtcgccgagaagatcggccccggcgcaatgctgatgccctgcgccagggccatctggaacaacttcaacgaatccgtctgctccggcagctccagccacaggaagtacccaccggccggttggctgacccgcgtctgtgccggaaagtagcgcgcgatcgccgccagcatggcgctttgctgttcttccagggcatagcgcaacttgcgcaagtgccggtcatagccgccgtgctgcagataatcggcaattgctgcctgggctggcatggaggggcacagtgacgtcatcagtttcaggcgttcgaccttctgcgcaaaacgcccggccgccacccagcccacgcgatagccgggagccaggctcttggcgaaagaaccgcaatgcatcaccaggccatctgtgtcgaaggccttcgcgggtttaggggcctgttgcccgtaatacagttcggcgtacacatcgtcttcgatcagtggcacctgatgctcgcgcagcagttccaccagcgcctgctttttcgcctcgggcagcgtcgcgcccatggggttctggaagctggtcatggtccagcacgccttgatcggatagcgctgcagggattgcgccagggcgttgaggtcgatgccgtcgcgcgggtgcaccgggatttccacggccttgagtttcaaacgctccaacacttgcaggcaggcgtagaacgccggggcttcgatggccaccaggtcgcccggttcggtgacggcttgcaggcacaggttcagggcttccagagcaccattggtgatcagcagctcctccatgggcagcatcaggccgccgaccatgtagcgcagggcgatttgccgacgcagttgcgggttgcccggcgacatgtcggtgaccaccaggcgcgggtccatttcgcggctggcgctggccagggaccgcgccaggcgcggcaacgggaacagcatcgggcttgggaacgccgagccgaagggcacagtgttagggtccttgatcgagtcgagcaccgagaacaccagctcgctcacatccacttcggtggactcatgcacttgctcgctcaccaccggctcggaaaacgggctgggcgcgtgggtgttgacgaagtagccggaacgcggccgtgcacggatcaggccacggcgctccagcaggtaataggcctggaacaccgtagacgggctgacgccgtaggtctggctggcatagcgcaccgagggcacccgctggccggggccgagcacgccggagcggatcagttctgcgatgtcgtcggcaaatttttcgtagcgtttcatgaggacctgattagcctttcaaatgtgttttcagcggttcagcggtgccacaaagcggctgtcggcagcactgtagatccacggctcgtccacatccgagaccttgaagcgcaaggtctgcgagctgctcgccggtttgtccgccagcaatgccaccgacaccggcacgtcgctgatttcccccggtgccaggctgatctcggtcttgccctgcaactggaagccctgcgcgtccaccagttccagacggtagtcctggcgctgctgggtcttgttgatcaccttgaggctgtagatgttttcgatcaggccctgtgcgttttcgcggaacatgccacggtccttggtcacgtccagcgagaccatcggccgttccaccaaggccaccaccagggctgcgatcatcaccagcagcaccgcactgtagccgatcaggcgcgggcgtagcaggtgggtcttgccgccttgcagttgatgttcgctggtgtagctcaccaggccgcgggcgtaacccatcttgtccatgatcgaatcgcaggcgtcgatgcacgccgcacaaccgatgcattccatttgcaggccgtcgcggatgtcgataccggtagggcagacctgcacgcacagctggcagtcgatgcaatcgcccaagccgacatcggcgggtttcacttcacgtttgcgcgggccacggtgttcgccgcgagccgcgtcgtaggaaatggtcagggtgtccttgtcgaacatcacgctctggaaccgcgcatacgggcacatgtgcatgcacaccgcttcgcgcaaccagccggcgttgatgtaagtggcgccggtaaagaacagcacccagaacaggctgacgccgcccatctgccaggtcagcagttcgctggccagggggcggatcggcgtgaaatagccgacaaaggtcagcccggtcagcacactgatgcctagccacaaggtgtgcttggccgagcgccgcgccagtttgttcaagctccagggcgcggcttgcagtttgatgcgctggttacgttcgccttcggtgactttctcgcaccacatgaacagccaggtgaatgaactttgcgggcaggtgtagccgcaccacacacgaccggcgaacacggtgatcgcaaacaggccgaaagcgcaaatgatcagcaaggccgacagcaggatgaagtcctggggccaaaaggtcgcgccaaagatgtggaatttgctttcagccaggtcccacagcaccgcctgccggccaccccagttcaaccagaccgtgccgaaaaacgccaggaacagcaagcccgcgccgctcacccgtaaggtgcggaacaggccagtgaaactgcgggtatgaatcaggttgtcgctggatttggccttcaccttctttgggtgtatgggctcaaaggtttccacggttgggattctttcgctcatggtcgttcgctcatcagcctccatcaggccgatgaactatgcgcgggacactgtttgcataacagactcaggtagagtgataaaaagcggatcagatgggctgcgtgcggcgtgctgcgacaatgtgctgcaccctgtgtcgcctagagtgcagcgctgcaacgtgtgtgttgatacagatcaatcaaatcagcgaaccaggtttttcggcctttacatgctggcgtccatcgtgggccccggcgaccgtcagggcgtcggcctcggcttcagtgatatagatccgctcggcggccaactccacgtaggacatggatttgtcggtgtcggtcgcgatattgacccgcgtcgctggcacgctctgttcctggccgttgtcgtcgagcatgaagtagcacagttggttttcgatacgaatgggcatgccgatctcctttctcgtggactatgcaaggttaggggccggcgatgtgcaggggttccaggcaactgactggcggtcgccgctgtccatcctttaccaataacgataaaggacggcatccatggacgcctggtggcatgaagtgtggcaaaccctgctggctgaattcgccgacatcggcgacgccaggcagcttactcagatcaccgtgcgcctgctgatcgccgcagtgctgggcggtatcctcggctttgaacgcgagagcaagggcaaggccgccggggtgcgcacccatatgctggtggcgttgggtgccgcgttgtttgtgatggtgccgcagatgtccggaaatcaggcggacgcaatgagccgggtggtgcagggggtgatcgcgggaatcgggttcctcggtgccggcaccattctcaaaggcaatgaggatgaagagggccagcacgtcaaaggcctgaccacggcagccgggttgtggatgaccgccgccattggggtagcggcggggttgggacgcgagtcgaccgctgtgctcagtactttattggccctggtggtgttcaatgtgatgccgaggattgtcaagctgctggagaagaaaactgggtaacaaggtctggtcaggtgaccagattttgataacgcagctcgccaaacaccttgatcaccatagggggggttccgggatcgttcgccacgatgagcacgcttgtccgggtgctcggcaggtaatggatttgcatttcaccacgggctccagaaaatttttccaccaggtgcaatggcgtgttcagctgtttttggatgttggtcaggtcgattttgtcgttgttgttaaagtttttgatttcgctgggcgcattcaatggggactcgctgagcgaaccataacggtaggttttggcgtcagcgttatagggtgtattggcaggtgatgagcgcagcgtcgcgttcaactgtgtgcccatctcctcaatttttttggctgttgcctcgattctggaaaatttttgcttgaggtcggcaaggccattttgtgcgttgttcatgtacgcaacgctatcccccaccccgtcgctatcaaatgcctttgcaatctgagagaaattgtcgagctcgatttgttgtatatgcctttctctcatctcgttgatgacttttttggcctgtgcggtgatcttgtcatgggacaactggttgacggatgcccaaggcgtcttggcgtttgccgccgagtgaggggtgttcatcgcgatttcgttcgcaagcttcttggaccgttcaagtaattccttgctttggttggaatctggttcgcgcaacatcttttcgatgttggtttcggtcaacagtgtttcaagttcgctcgccgcgttgcgcgcctcgggcccagaagatgctcgaggtgcgggtgtgttcggtgccggctcgggctgtttgtggggcatggaacaattggggccagactttagcagcccattgatacgctcagacgtcagcccaggttggccgggcgtggagttggatagtgtgggctgcacgccgggcgatgagcggccctgctggggatagatagtcgacattgattcatcctcgtgaggcttgtggttgcacgatatagccaaggcggtggttatgcgccctcgcgggatgagtgtaagagtgagtggcatcgctagagcttaggacgggtctgacagctgagtgggaatttttacttttctcaaccgttcgcccgtgcgcctgaagcaatgtctgcgcacgagcgagccctccacttctgacaatgttcagacaatcaccggcggcatcgttgttggcggctcctccaccgacggcggcgggttttccggtggctctttttccggaatcggttctggctcggtcggtggcaaggtcgggttatcgatattcgggtccggggtttcagccgggatcgggatattcatcggtgtggcctcctttgtgctttgctctatcggtggacacccgccagggcgaattgattccccgcccaatggcggcacatccacctgaacttttaaccggcacgcaggctcggacctatgacggctctgctcagggagagcgctgccgtatcagaatttcggatcaagcaaagagcgtccacagggcgtaaggggaagatgctcgatgactgctgaaacacaggttccagacccatccttattgccgctgtcccaggcgctgttgctgccacggatcgcgatcgaaagcaccacccccgtgatcgacggcggcgaatttgccgtcaaggccgtggtcggccagcgggtcaacgtcaccagcaaggtgttcgccgacggccatgacaagctggccgtgctgatccgctggcgcccgttgcaagacgaaagttggcacagcgtggtcatgaacgacgtgggcaataatggctgggagggcgcgtttaccgtggcccagcaaggcccccacgagtactgcatcgaagcctggatcgacaccttcgccagcttttgctacgaactgcgcaagaagcacgaggccggtgtgccggtcagcctcgagctgcaagaaggccgcagcctggtgctgcaggccgccgagcgcagtgacaacgagctgcgcgaccgcctgatgctgctgcaccacgaactctccgggctgctggaaaccgagcaggttgcgcagttcctgcacgaagacagtgcacatttgatgacccaggcagatcaccgcgcctacctgagcatcagcacggtgtacccgatcgatgtggagcgcgaagcggcattgtttgccagctggtacgagctgttcccgcgctcgatcactgacgatcctgcacgccacggcacctttaatgacgtgcattcacggctgtcgatgatccatgacatgggcttcgacgtgctgtactttccgccgatccaccccattgggcgcagccaccgcaaaggcaagaacaactcgctgaccgccggccccgatgatccgggcagcccgtatgcgatcggcagcgaagagggcggccatgaagccattcacccgcaactgggcagccgcgacgacttccgccgcctggttcaggccgccgccgagcacggcctggaaatcgccctggacttcgccatccagtgttcccaggaccacccatggctcaaagagcatccgggctggttcaactggcgcccggacggcacgatcaagtacgcggaaaacccgccgaaaaaataccaggacatcgtcaacgtcgacttctacgcggcggatgcgatcccgagcctgtggaccgagctgcgcgatatcgtggtgggctgggtggaagagggcgtgaagacctttcgtgtcgacaacccccacaccaagccgctgccgttctggcaatggctgatcagcgatgtgcgcgcccggtaccccgaggtgatcttcctggccgaggcgttcaccacgcccgcgatgatggcgcgcctgggcaaggtcggctactcccagagctacacctacttcacctggcgcaataccaaggccgagttgagcgagtacctgacccagttgaatgaatcgccgtggcgtgaatgctaccggccgaacttcttcgtcaacacaccggacatcaaccctggcttcctgcacgagtcggggcgcgcgggctttttgatccgcgctgcgctggcaaccatgggctcgggcctgtgggggatgtattcgggttttgaactgtgcgaagcggccccggtgcccggcaaagaggaatacctggattcggagaaatacgaaatccgtccacgggatttcaccgcccccggcaacatcatcgccgagatcgcccagctcaaccgcattcgtcggcagaacccggcactgcagacacacttggggctcaagctctacaacgcctggaacgacaacatcctgtatttcggcaagcgcagcgaggatggcagcaacttcattctggtggcggtcaacctggacccttacaacgcgcaggaggccaacttcgagttgccgctgtgggaattggggctgccggacgatgcccagacccagggcgaagacttgatgaatggccaccgctggacctggtatggcaagcaccagtggacacggctggagccgcagatgccgttcgggatctggcgtatcaccacctcttaagccccgcgcggtcaatgtgggaggggcggtgcgacgattcgacttgcccccgattgcggtgtgtcagccacagcttcatcaactgacacaccatcatcgggtgcaggtcgagtcgtcgcactgcacctcccacattgaccgagtggttcaagtatttcaggagtttccaatggcgaagaaacccaacgctgccaccttcatcaaggacccgctctggtacaaggacgcggtgatctaccaggttcacgtcaaatcctatttcgactccaacaatgacggtatcggcgactttcccggcctgatcgccaagctcgattacatcgccgacctcggcgtcaacactatctggctgctgccgttctacccctcgccacgccgcgacgatggctacgacatcgctgaataccgaggcgtacacagtgactacggcaccatggccgacgccaagcgcttcatcgccgaggcgcacaagcgcggcctgcgggtgatcaccgaactggtgatcaaccacacctccgaccagcacccctggttccagcgtgcgcgcaaggccaagcccggttcggctgcgcgggacttctacgtgtggtcggatgacgaccagaaatacgacggcacgcgcatcatcttcctcgataccgagaagtccaactggacctgggacccggtcgccggccagtacttctggcaccgtttctactcgcaccagcccgacctcaacttcgacaacccgcaggtcatgaaagccgtgctgtcggtgatgcgctattggctggacatgggcatcgacggcctgcgcctggatgcgatcccctatttgatcgaacgcgatgggaccaacaacgaaaacctgcctgagactcacaacgtgctcaagcagatccgcgccgagatcgatgcccattaccccgaccgcatgttgctcgccgaagcgaaccagtggccggaagacacacagctgtacttcggtgacaaaaagggcgacgacggcgacgagtgccacatggctttccactttccgctgatgccgcgcatgtacatggccctggcccaggaagatcgcttcccgatcaccgatatcctgcgccagaccccggagattcccgccaattgccagtgggcgattttcctgcgcaaccatgatgagctgaccctggaaatggtcaccgacaaagagcgcgactacctgtggaactactacgccgccgaccggcgtgcgcggatcaacctggggattcgccgccggctcgcaccgctgatggagcgcgaccgccgccgtgtcgagctgctcaacagcctgctgctgtcgatgcccggtacgccgaccctgtattacggcgatgaaatcggcatgggcgacaacatctacctgggtgaccgcgatggcgtgcgcacgccgatgcaatggtccatcgaccgcaacggcggtttctcccgggccgacccggccagcctggtgctgccgccgatcatggacccgcaatatggctatcagtcggtcaatgtggagacccaggcccaggacccgcattcgttgctgaactggacccggcgcatgctggcggtgcgcaagcagtccaaggcctttggccgaggcagcctgaaaatgctctcgccgagcaaccggcgcatcctggcctatacccgcgaatttaccggtgaggacgggcgcaacgagatcatcttgtgcgtggccaacgtgtcgcgcagtgcccaggcggcggagctggacctgtcggcgtttgccgggatggtgccggtggaaatgcttggcggtaatgcgttcccgcccatcggccagttgaatttcctgctgaccctggcgccctacggtttctactggtttgtgctggcgccggaaaaccagatgcccagctggcatgtggaaccggctcagagcatgccggacttcaccacattggtattgaaaaaacgcatggaagaactgctggaagaaccttgccgagcgtccctggagcagaccgctctgccagcgtggttgcccaagcgccgctggttcgctggcaaggacacggcgatcgacagcgtgcgcattgcctacggcgtgcgatttggcgacgcgcagcatccggtgttgctcagtgaagtcgaggtgacggccgcaggccaggtcagccgttaccagttgccgttcggtttccttggcgaagatcaattcaccagcgccttgccccagcaattggcgctggcccgagtacgtcgggtgcgccaggtggggttggtgaccgacgccttcagccttgagcacttcatccgtgcggtgatccagggcttgcaggcgggcaccgtgctggagaccagtgacggcgagctgcgctttgctgccacaccgcatttggccaagctgcaactgacggatgaggcggaggtgcgttacttgtcggccgagcagtccaacagctcggtggtggtgggcgagagcctggtgctcaagctgatccgcaaagtcgcctccggcgtacacccggaactggagatgagtgcttatctgacagctgcgggctacccgaacatttcgccactactggggtcgatggtgcgccacgacgccgagggcgaggacaatctgctgatgattgcccagggctacctgagcaaccagggcgacgcctggagctggacccagaacaacctggagcgggcgatccgcgacgaactggccgaggccatttccgagcaggaacaacactacaacgccctgggcgagctggccgattttgccggcttgctcggccagcgcctcggcgaaatgcaccaggtgctcggcgccaaaactaccgacaaggccttcaaacccgaagtcaccacggccaaggacacccaggcctgggccaaggatgtcggcgcgcaactggaccgtgcgctgcacttgctcaaacttcatcaaagccagttgaacccggcggatcaagtgctggtcagtgatttgctggcacagaaaaaagccatcgccagccatgtacaggctttggcgaaagccacggcgggcgggttgcgcatccgtgtgcatggtgacttgcacttgggccaggtgctggtggtgaagggcgatgcttacctgatcgacttcgaaggggagccggcgcggccattgcatgagcgacgtggcaagcacagtccgtacaaagatgtgagcggtgtattgcgctcattcgactatgcggcggcgatggccctgaatgttcaaggggtggatcactcgcccgaggcggaccaggcgcgcagacgcgtgacagagcgttacctcaaggaagcacgccaggcctttatccgggcttatcaggcggcgacggctacactggcgcatgactggcaggatgccaaaggccaggacgccgcgctgacgttgttcagcctggagaaggccgcgtacgaagtggcttacgaagcagaaaaccgcccaacctggttgccggtgcccctgcaagggttgcacggattgttgagcggtatcgcacctatatcgaacactgcacgcggtggggagacgtcatgagctttacacataaagaaccgctgcaaccgaaactgactgcattgccggcgtccaaggacgtcgaagcgctggtccgcgccgaacaccacgacccgttctcgattctcgggccacacgatgatgatcacggcggccagtttatccgtgcattcctgcccgaggccttgagtgttcaggtgctggcccgcgacagtggcgaggcgctcggcagcctggacgcgagccaggtgccgggcctgtttgtcggccagttcaagacccgtcagccgtacctgttgaaaatccagtgggctggtggcgagcagattaccgaagacccgtacagcttccagcaactgctgctgggtgagatggacctgtacctgttcgccgaaggtaatcaccgcgaccttggcagttgcctgggcgcccaggtgaccagcgtcgatggcgtggcgggcgtgcgctttgccgtgtgggcgccgaatgcgcggcgggtgtcggtggtgggcgacttcaatatctgggacggtcggcgtcatccgatgcgcttgcgccatccttccggcgtgtgggagatcttcatcccacgcctgcaaccgggtgcggcctacaagtacgagattctcggtgcccatgggatcctgccgctcaaggccgacccagtggcgctggccacccagttgccgccggacactgcctccaaggtggccgaaccgttgcaggtggactggcaggatcatgaatggatgcaggcgcgggtcgataagcagaaggccaccgcgccgttgtcgatctatgaactgcacgtgggctcctggcagtgcgagttggacgaggcgggcgaagtggcccggcaatacaactggcgtgagctggccgaacgcctgattccctatgtgcagcaactgggtttcacccacgtcgagctgatgccgatcatggagcatccgttcggcggttcctggggctaccaggcgttgtcacaatttgctcccacggcgcggttcggttcgccgcaggatttcgcctacttcgtcaatgcgctgcaccaggccgatatcggtgtgatcctcgactgggtgccggcgcattttcctaccgatacccacggcctggcgcaattcgacggcactgcgctgtacgaatacgccaacccgctggaaggcttccaccaggattgggacacgctgatctacaacctgggccgcaccgaggtgcacggcttcatgctggcttcggcgctgcactggctcaagcatttccacattgacgggctgcgcgtggatgccgtggcgtcgatgctctaccgcgactattcgcgcaaggccggcgaatgggtgcccaaccgccatggcggccgtgagaatctcgaagccatcgacttcctgcgccatctgaacgacgtggtggcccaggaagcgccgggtgcgttggtgattgccgaggaatccaccgcctggccgggcgtgagccagccgacccaacagggcgggctgggcttcaactacaaatggaacatgggctggatgcacgactcactgcactacatccagcaggacccggtgtaccgtgcccaccatcacaacgaactgagtttcggcctggtgtatgcctggtccgagcggttcatcctgccgatctcccatgacgaagtggtgcatggcaagcactcgctgatcgacaagatgcccggcgaccgctggcagaaattcgccaacctgcgcgcctatctggcgttcatgtggatgcatcccggtaagaaactgctgttcatgggctgcgaattcggccaatggcgcgagtggaaccatgaccagcaattggactggtacttgttgcaatacgccgagcacaaaggcgtgcaaaagctggtgggggacttgaaccggctgtaccgcgaagagccggccttgcatgaacaggacgacgcaccccagggcttccagtggctgatcggcgatgacgcgatcaatagcgtctatgcctggctgcgctggagcaaggacggtaagccggtgctggtggtggccaacttcaccccggtgccgcgtgagggttacgccgtcggtgtaccttttgctgggcgctggagcgaagtgatcaacagtgacgccgatatgtacgcaggttccaattacggtaatgggggcgaggtgttcacccaggatgagccccgtcatggtcaagcggtgtcgctgtcgctgaatctgccaccccttggcgtgttgattctgcgtccggaagcgctttaaaggctctactgtgctggattctgttgtccacgctactggcagggtgccacaatggcgcctttgtcgtagcagtcgaatcgggcgaatttcatgaatggccttgggcgtgggcaggaccaggattgctttatagaggagcaggtgcggactgatcgtttgcaccagctgttccggcagtcatttgccgccatcttcggcagctacttgggcgccatgatgctctgctggctgtgttgggaccgctttgatcatcaagtcatgctgatctggctattgacgctggcagcctcgacgttgctgcgactgcagatgttcatggagtggtttcgttgccccaacgccgagcgcaccccggatcgctgggagcgccgctactggaccacgctgatgctgtcggccggtatctggggctttggcgcgttggcggtgatgcccaccgatgaccggctctcccaggcgctggtgatgctgttcaccgtgggcatgtcggtgagtgcagtgtcgtgttactcggcctatcgctatatgacgctggggtccatgggcctggttttactgccatgtaccctatggttgctgttccagccttcctctatgcaggtgggtgtggccgtcgcggtactggtgttttccacctttgtggtgagcgccacgcgcaagttgtccgatgccctggaaaaagcctttcgcctgacccggcaaatggagcgtgcccacaacatttccactcgcgccgcacagaccgatgaactcaccggcctgatgaatcgccgcgcctttttcgagcatgcccaggtgttgtacgaacaatgccgccacaatcgtcagccgctgtgtgcgctgatgatggacatggaccacttcaaggaaatcaacgacacctacggccaccaggccggtgaccaggtgttgcgccagattggcggggtgatcagcgcttcgttccgccaggctgatgtgtacggccgcctgggtggagaagagtttgcggtgctgctgcccaacacttcgctggaaaccgcacgggttatcgctgaacagttgatcaaggcaatctccggcctgtcctccgcgccggtgcatgggttgacggccagcctcggtgttgcgtccacccacactcaggatcaagacctgcacggcctgatgaatacggctgacaaggcgctgtatcgcgccaaggcccagggccgcaatcaggtggcggtggcggagtaagacttcaaattgtagcaagcgggcttctttggcaaccaggcctggtcgctagggcatcgccttggtcagtgcccgcgccacctgatcggccgagtagggcttggcaaggaactcgaacccttcgtagccgctgtcggccaactcttcgctgtagccggaagtcagcaccaccggcaagtccgggcgccgctgacgcagtaccttggccatggccacgccggtcatgccgggcatcaccacatccgaaaacaccccatcgaaggccagggcatcggcgccggccagggtcagtgcctgttcggcatcggtggcccaggtggtgcggtagcccaggtcctgaaggatctggttggcgaagcggcccacttccaggttgtcctccacgatgaggatatggcgctgcgctgcggtgtggaccggcgcaagatcttcctgctgctgcacgttgggcattgtttgcggggccacttccggcaggtacaaggtaaacaccgtgccctggcccacgcggctggccacgtcgacgttgccaccggactgcttggcaaacccgaacacctgggacaagcccaggccagtgcctttgccgaccgccttggtggtaaagaatggctcgaaaatgcgctcgaaggtatcgcccggaataccgctgccggtgtcggtcagggagacgctgacaaatggctggagtgcctgcgcatcgccgcggatgcacggcagtgcctcgagcgtggcgacgcgcagggtcagggtgccctggccgtccatggcatcccgggcgttgagggcgatgttgatcagggcggtttcaaactggctggagtcaacccgcacatggcaggggcgctctggcaattgcacctgtacgcggatgcgtgcgccggtgacgctttcgagcatctcggcgatgttcttgacccgctggcccgcatcgaagacttccgggttcagcggttggcgacgggcgaaggcgagcaactggctggtgagcttgctggcccgttccaccgtatcggacaccgcccccatgtaacgctggcggcgttcttcggacagcccaggctggcgcaggaagtccaccgaggaacgaatgatggtcaacaggttgttgaagtcgtgggccacgccgccggtcaattgaccaatggcttcaagtttctgggactggtgcaacgcagcttcggcctgggtgagggccgcggtgcgttcctgcacccgttgttccagtgtggcattgagttcggtgaaggctgccaggccttcgcgcacggcggcgtcagcgcgcacgcgctcgatgtgcgcccaggagcgctcggtgacttcgcccaccaacgccaggtcgtagggtgaccaggcccgaggcgctttgtcatgcacggccatcaacgccgtgagacggccgtgcttgatcagcgggaaacacacggtggccaatgcgcccaaggcctgatagctggcggcgtcttcaggggtgaactcgaggcgattgtcttgcaccaccagcggctcgccggcgcgcaggcgttgcaccgccaatgcgccgaacgaggccaggctgtaatggccgacgatgctcggcgagccgtgcgctgcccagttgccgcgaatggtaaaaccgtcttcgtcggcatccatgtcggcataggcgcagttggagacttgcaggtgctcggccagcaggcgggtggtggtggccatgatgtgttcggcatcggtggcggtggcgaccgcgttgccgatggtgtccagggctgccaggcgctgggtgagaaacacggtggtggtggtttcggtgaccgtgtcgagcatgccgacgatcttgccattggggtcccggatcgggctgtagcagaacgtgaaatacgcctgttcaggcccggcaccacgctcgatcaccaaggggaagttttcgatataggtcgcgtgcccttggaaggccgcgtcggcgatcgggctgacctggtcccagacttcgtgccaggtttcgctgaacgggcggcccaatgcgtcgggtttatcgcccaggatcggaataaacgcgtcgttgtagagcgtgatcaactgtggcccccagatgatggcctggggaaagcttgaggcaaagcacagtgcggccgtggtcttgagcacatccggccactgttccagcgggcccaggggcgtactcgcccaatcatgctggcgcacccgctcagccatctcgctgctgctttgcagccaattcatcattgcaagaacaccttgtttaccgcggtctgtttaacgcctggaagggagggcctgacaagcaacagaccggaaagcccgctggcagttcagcgggattatcgcggtgatagcaatttgatgcactatccgtatggatagatctgcaaacctgcttattgcgcgccgaaaaccgccgtccaataaatccctgcgtcactcttcgggtccatcgcataggccgcgcccagttcgcggaactgcgggttcatcaggttggcgcaatggcccgggctggcgagccaaccgtcgaccaccttgcgtggcgtgtccaggccggcggcgatgttttcgccgatgttcttcgcgatgtacccggccaactccgcacggtcgcccggtgtgcggccgtcgtggtcgaggtggtcgaagaagttgccgttggccatgttgcgcgtgtggctgttggcggcgccggccaggtcgtcattccacgacaacggcgtggtggcggtaaacgcctgggtgccgcattgccgtggctgagaccgcgcggtgttgatcaggttgagcagttgcctgccttcggtctgccagtcgcccaggccactggtcagcagcgggcgagcaagcacgatgcgccagtcctggccgctgttgctcacgccgatatcaacaaattgcgggtccagcaccacgcgacagaagctttcgcgcacggccttcatcgccgcctgggcatccttgggcccggacaggctgatggcctgcacgttgaccatcgggtacgcggcgcgtgccagcgcttgctgcaagtcgcccacattggtggccggcagcaccagccgtgtgtcgctggccagcggtggcagttcctgggaaccctggtcgccgcagcgctgcacctggctgcggtattggttgatctgttgtaccaactgactttcttcattcgccatcgcgctggcgcagaacaccgtactggcggccagcgtcgtaagacccatcatcaatgacagaacgcgcatggacgttacccttgagcttgaaagtgcccatgatgcgcgatgtaacccggtctggcgcaacgccttttttgtttttttgcctcaatgggtgttctggaggccgttacaagcgctgaagcgacgccatgccatcacactggccagcaggatcaaccccagcgccacgctgaacgtggtatgcaggccataggccacggactggggcagggcgcgggtcacgtccgggctggcccaggcgaacacggcacccagtacggacgtgccgacgatcaacccgagattgcgtgacaggttcagcagccccgagacagtgcctcgctgcgagctgtccacattgctcatgaccgccgtgttgttggcggcctggaacaggctatagcccgtcgtcaaaacgaccagcgaggcaaggtaggcgatcagtccggaccccagcgacaacaacagcgcaccacaggccagcactcccagcccggcgagtgtcacgcgttggctgccgaagcgatcggtgagacgtccggccggtacgccggtgaaggccgcgacacaggggccgagcgccatcgccaggcccatccactcagggtcgaggtccaggccgcgggacagatagaacggcccgaccacaaaggtggccatgatcacggcggcgaccaaggcactcatggccaggccggcgcgtaacgttggcgccttcaggaaggaccaggaacctcggcctatggacgatggcgcgcaggggcgatcaaccggcaaatactggtaggcgattgcggcggccaccgatcccagtggtatgccgacgaggaagatagcgcgccagccccacacactgagcaacaggccccccatgcttggccccatggcggtacccacggctgacattgtgccgagcaagcccatgacccggccggtacgctccttggtcaccgtatcgccaaccatgcccagggccatggccatcatgaccgccgcgcccaggccttgcaggatgcgcgcggcaatcagccattcaagtgccagcgccatgccgcaaagtccacaggccacggtgaacagtaccaacccggcgagcaacaatcgccggcgccccaggcgatcacccaggcgcccggcactcacaatcaccgcggtgattgccagcaagtaggccaacaccacccactgcacggcgtgaaacgaggcatcaaacgcgtgcgccaggctgggcaagccgacgttggcgatgctggtgccgagggaggccagcaacatggacagggacaggctgacaaggctgccacgggaagacgtgcgcatgggtaattccttgaatgaacgcaactgtcacaaatctacggcgtggcctaacatggcggaagacgcatgagttgcagttaatacctgcatgcaacgcctgataaggagcgccgatgcccgatctcaacctgttgatcaccctggatgcattgctcgccgaaggcagcgttgcggcggcggccaaacgcctgcggctgagcgcatcggccatgagtcgcgccctggcgcgtctgcgcgagaccaccggcgacccattgctggtgcgcgccgggcggggcctggtgccgacgccaagggcggtggaactgcgtgaacaggtcagtcgcctggtgcaggaagcccacgccgcgctacgccccgtgcaatcgttggacatggcccaggtcgagcgcacctttaccctgcgcaccagcgaagagttcgtcgagaatgtcggcccggccctgttggcgcgcatcgccggggaggcgcccggcgtgcgcctgcggttcatcaacaagaccgacaaggacagtgcaatgctgcgcgaaggccgtgtcgacctggaaaccggcgtggtcgaccccagcgccagcccggaactgctgacccaggcattattccgcgaccgtctggtgggcgtggtgcgcagtggccatgccctcagccagggcacggtcagcgccgagcgttacgctgcgggccaacacgtctacgtgtcccggcgcgggcaggaccgtggccagattgacgatgcgctggaagccgtgggccttacgcggcagatcagcaccatcgtcgccggtttcgccaccgccatcgccctggcccgcgacaccgacctgatcgccagcgtgccagagcgctacaccacccatcaacgtgcaggcctctacagctttgcgctgccgctgacgctgccgggctttaccgtggcgatgctctggcacccccggctggatgccgacctggcgcatcgctggttgcgtgggtgtttgcgtgaggtatgcgccgaacaggtacaatccgcgctgccttgacgctgaaccccaggaatttgcatgtacagccttacccgctacaccacaccatgccccgagccgatcaacagccagatcctgcaactggtggtggataacctcaccgacatcagcagcgtagcgctgccgccgagcaacctgctgtacaacatctaccaatacgccacgggctttgaagtgcacctctacctggaagcgctcaacggtgccaaaggcattgcggtcgagttggtggtggcgatggacggcgaaaagctgatgggcttttgcctgtacctgcccgtgaaggatgatcccgaggcctgcggtgtggcgttcatggcggtgcaagtcggctatcgccgccagggtgtggcccgcgcaatgatgcgtgacgtgctgagccggtatccccatgcggaactggcgtgctcagtggagaaggtgcccgcatttgagggcatgggctttcaagtgcgtggtgcacggggcacccaggtgttgatgaacacccggcactacggcaccgacggcctgatgggcgtgctggatgtggcagcgatctacagctcgctggaggtacggcagattcatacgtacctgctgcaaaagcatggcaagcgcgccatggtggacgcggagaaacagcgtgatcggcacctcgatcaactggcgcgcaaggtgcggttgtttgttgacgggcgttgagtgaaccttttttgtggcgagcgggcttgctgtggcaagcctgctgactacaacccgccctcgcttatggctttttcaggctccagttgccgccgccgtgccggttattccttcgacacgcccacgattgaccatcgccaggatggtcgccaacaactcctgctgcgcctcttcacggctgatctcaccactggccgccgcttgggacaacgcctccgcagcccccagcattgcccttagacccgcctgggaaatccgtccgaacggcgacagcgcatcgcggcatttatcgagaaagatcgcctcgtactggcgcttgagcgtctcaagctccggcgagctgctgagcgcggcaatcacccccggaatttcccgaccctgcaacagcacgcagtccacataggacgcggcgatcacccaggcacgatcctcaagcgtggcgctgctggcctcgatggcgtcgacaaacacctggttctggcgcgcatcgaaatcctcgtacagcgcggtcaacaacccggcgcgagtgacgaaatggtcgtagaccaccggcttggtcacgcccgccaactccgccaggcggccgagagtcagggcgtcggtgccttcatcgcgcaccagttgccaggcgacttcaagtaattggcgcaggcgatcttcacgggacaggcgacggcgtggggcaggggatgcagggcttgacatgcttatataccaaaagtaacttactaatcgtaacttaagcccagcctaaccctaaacgggagtttttgtcatgcatgcgttgattgttgttgcccatcacgacccgcaatccctcacccacagcgttgccgcgcaggtggccgccggcctcggcgcatccggccacacgttcgagatcgccgaccttgccgccgaaggtttcgacccacgctacaacgccgctgaccatgcggtccaccgcaaccgcgccacgcctccggccgacgtgctggccgaacaggcgcgcctcgatcgcgccgacgccctggtgctggcgttcccgatttattggtggtcgctgccgggcttgctcaagggctggatcgaccgcgtgttcgtcaatggctgggccattgagtacggccccgatacacctgtggtgaaaaaattgcgacacctgaaagtgcacctgctggccctgggcgcagcggatgacgatgcctttgatcggcatggctatgccaaggcgatgcgcacgcagatcgactacgggatttttgattactgtggcgcgcaggtggtgacgtcagaattgttgctggagtcggaaagcggcggggcgcaggcgcacctcgacaaggccagggctgttgggcggggactgttcgaaaccgaggcggttgccggttgattcaaccttcgcgaaacaggtcgtgggcgtccagcaggcggtaggcgatttccgggcgtttttccaggcctctgcggattgctgccgggatcgattggcgggtcttgcgacacatccccggcaaatcgtcgatgacgatctgaatcccgcgcatgctcttgacctcggtatggccaggtgcgatatgcacgcggatgcccagttgctggtacatcagctgttgcatgcgctccaggtcctgcaggctcttgaggtcttcaagacggtcgagcagcttcttctcttcctggcgcgtgagctggaggatgcgctggtcggcgcccggcgtctccagcagctgttcgcggtcgcagacgcaggcgccgggtgggcagggttggcgaatgatcatgtgcagagcctccccattccgacgctgacgctttaatagctcagttggaccccaagactgcccagcgccttccagtactcaggataggtcttggccacgcagtccgggtcctggatgcggatacccgaaaccttcagcccggccagggcaaagcacatggcaatgcggtggtcggcgtgggtgtcgatcagcgcggtgcacgaggtgccggccagcgcaggatcactggctaccaacaggtcatcgccttcgatggtcgccaagcccgggcggatttcgttgaggccgtcatgcagtgcctgcacacggtcgcactccttgacccgcaggttggccagctcggtgaaacgcaccggcgtgttattgaacgccgcgagcactgcgagggtcgggatcgcgtcctgcatctgcgagccgaccactgtggcctgcatgttcggaaactgtgcgatcacggcctgggccttggcgtccggctgggtgaagtcctgcgccgccacgccgatgtcgatgcggcctccagtcaacacttgcgcggcccacaggtaagtggcggcggaggcgtccggttcgatcagatagtcgtgggcggtgtagccggtcggggccacgcgccaggtggtgtcgtcgaccgcttcaacctgggcaccgaaggcgcgcatgcagtccagggtcaggtcgacatagccacgggcaccgatgtccttgccggtcagcgccacttcaatcggcgcttcgccgcaggccgcaagcatcagcagggccgacacgtactggctggacaggccgccgtcgatctcgaagcgcttagccttgatcttgcccacgccgtgcacggtgaccggcgggcaaccggtcgggctgtcgaccaggatgccgttctggccgagggtcgccagcaacgggccgatcgggcgtttttgcatgtagtcgtcgccggtcaacaccacggtgccttcgaccgtggccacggcagcggtgagaaaacgcatggcggtaccggcgttgccgaggaacagcggttgtaccggcaggtgcagtttgccgtggccggtgacgacgaaggtggtgtcgtccggctcatcgatggtcacgcccatttggcgcagggctaccgacatatggcgcgtgtcgtcactcttcagcgcgccgctgagacggctggtgcccttggccagggccgccagcaacagggcacggttggtaatggatttggagccggggggcgcgaccttgccattgagggggaagttgggcggtgtaacggtcacggttttctgcgaactcaaggtacagggctcctgatcaaggcaaggtcggcgggcggacccgaataatcggccaaagcggcggtgcttgtcgagcgcgcggtcgcagacgctgaaatttactgggcggtgtacatcaattccaattgtaggagctggcttgccggcgatggcggccttacggtgtacatatccgtctctttggtaacggcggctattggttccgctcttacagcggctcacttttgatagagcgcaaaagtaagcaaaacgctcctgccccaacactcggcacctcgcctaggctcggtgtgcccgtaattcgacagtgatttggggggccgccaccacgcgccatccatggcgcggggcggctaaaccggcatccctgccggtttaccccccaaatccctgccgaattccggccagcgtgtttgacggggcgcctaagatcaaaatcaaaagccagagcacagcggcctgagagccggcttgagtggtgtaaagcaaaggcgaatgcaaacgcggaccctgtaggagccggcttgccggcgatgcaggcgcttcggtccttcagatacacctatcgctgtgccaaccaataatcatgcagcgcccgcgcagccggttcgatttcactgacgcgctgctggtgcgcctgtacatccaggtcggccggcagttcgaaattgtcctgctcggcgcaccaggaaatcttctccaactgcgcagcctgtgcggctggcagttccggccagttaccgatggcggcgccacggatgtagccaaagcaccattcttcggcgagggtcacggtgtggccctggtgttcggtttcgtcgaagcgcgccttgaagcctgtggcgtcggtggccagttgcccggccagggtgttgatatggcgtacgcacagttcgaggaagcgttgcgcttcgtccatgttgtcccattccgggttctggccgccccagattgccgggaaccactccgccacgtccacctgcaccgggctggacaccagcgcggtgaagtagccgtcgagttcggccaggttcagcaccgaatggtcgtcgccgtatttaagcaaagtgtcttcgatgaactcgaattcagcggcggtgaggggttgggcgtgcatgggcatatcctttaaacgtcgagcgccgcgaatggggcggcttaaagcgcgaaggatggcgcttgggcccagccctttcaaggtctttaggtagaacaggcgataagtaccctgtggcgagcgggcttgtcccgcgttgggcggcgaagcagccctgaaacccgcagccgaagagtacctgacgcaccgcattcttccttccagggtcgcttcgcaacccaacgcgggacaagcccgctcgccacaattgccgtgttcacccttaatgggagggcgtcagtcagatatggccggcttttttccagcagtttccatgcgttggcacagcttgctcacgcacaccgcgccgaccaccgcgaggatgatcggcaccaggaagtcatggtctatgcgggtgaattccgccaccagcacaatcgcggtcagtggcatgctcatgctggcggcgaggaacgccgccgcgccgatgattgcaaacgcaccgaggggcacgccgggccacaccaggctccaggtgccgccgaggatgatcgccagtaacgcgccattcgccaggccgggggtgagcaggccgccttcggccccggcgcgcaggctgctgctggtgatcagcactttgaccaccagcaacagtgcggccaggccgatggtcagttcattgtcgaaacccaattgcgcggggcctttgccattgccgaggatttgcggcagcagcatcgccaggccgccgataacgctgaagttgatcagcgccagtaccggcaggcgccagcctctggcggcgtttgcccttgctgcgccggtcagccgggtgaaggcataggccgccacgccgaataccggcccacacaccacggcccaggcgatcagcaccgggctcagcacaaaatgcggcaccacgtactgcgcctctgcccccagcccgatccacgccaccgctgcaccaatcgccgaggtcgccagcgcaatcagcgccgccggccaactgaatgcgcccaccagcacttccagtacaaacaccgcgccgcccaacggcacgttgtacacagccgccagcccggcacccgcgccgcaggccacgatcagtcggtgcatgggcggttcgagtcgggcgcgttgggacagccaggtggcggccagtgcaccaacctcacggggcgccacttcacgccccagcggcgagccgagagccacggtgatgatctgcaaaagcgcgtgggcgagggtggttttgggcggcatgattggcatctgttccgacaccgcctgcttgatgctcaccagcgggcgcccgtagcgatagagcgtccaccagcccaacccggcgaccaggccgcacactaccaacacctgcaaacggcgctccggcgcggcggcggtcacgccccacaaaaaggtttcatggctgaccaggctgtcgaggctgtaaccgtacgccaggtgctgaataccgtgcagcagcagggccaggagcatgccgcccaggcctgcgccaataccggtcaacaccaccaccagggcaagaatcagcgacgaacgcaacgtggacggcatagacggctccaggcaagggccctgattgtatagccgataagccgggcctccgggatgaaatgtatcggggctgcatgaaccttgcgcccacaacattccattacgtttgcccgtcccgtttttggccgatgtgccgtcacacacacttgttatagttcgggccttatcactcgccagtcagggatcactgccatgtccgaataccaagctttcgtcgtcgaactcaccggcaacgttgcccatgtgcagatcaaccgcccggaaaagatcaacgcgatgaacgccgcgttctggaccgaaatcatcgacatcttccagtgggtcgaagacaccgacgccgtgcgcgccgtggtaatcagcggcgccggcaagcatttctcctctggcatcgacctgatgatgctggcctcggtcgccaatgactttggcaaggatgtcggtcgcaacgcccgcctgctgcggcgcaagattctcgaactgcaagcctcgttcaacgccgtcgacaactgccgcaagccggtgctggcggcgatccagggttactgcatcggcggcgccatcgacctgatcagcgcctgcgacatgcgctacgccgccgaaggcgcgcaattctcgatcaaggaaatcgatatcggcatggccgccgacgtcggcaccctgcagcgcctgccgcgcatcatcggcgacggcatgctgcgcgagctggcctacaccggtcgccagttcggcgccgaggaagcgcgcagtatcggcctggtcaatcgcgtctatgccgatcaggacagcctgctggccggcgtcatggagattgcccatgaaatcgccgccaaatcgccgattgcgctcaccggcaccaaggccatgatcagctacatgcgtgaccacacggtcaatgacggcttggaatacgttgccacctggaactcggctatgttgcaatccaacgacctgcgcgtggccatcgcggcccatatgagcaagcagaaacccgaattcgtggattgactgacatgaccccaggctggattaccacaacgctgctggacaacgacacccctggcggctgggccgtcgcccgcagccgcgacggctttttgcatgacaccaacggcccgttgtttccccgggaatggctcaagcgccaggacctgtcggtgtttgccgaacacggtatcggccacctcgatggcgagccggtgtacctgctggaactcgatgcggcgggcgaagtgccgggctgcagttggcagggcctgcgcggcttcatgctgcaaggcgatcacaccctttacaaagtgctgggctatgcggcgcagatcggcacctgggcacgtgagcaccggttctgtggcagttgcggccaggccatggtccaggtgccacgggaacgcgcgatgcactgccaggcctgtgacctgcgcagctacccacggatctcgccgagcatgatcgtgctggtgacccgtggcgacgagatcctgctggcgcgttcgccacgttttgtcagcggggtctacagcaccctggcggggtttgccgagccgggtgagtcggccgaagactgcctgatccgcgaggtccgcgaagaggtgcaggtggaggtcaagaacatccagtacatgggcagccagtgctggccgttcccgcattcgatgatgctgggctttcatgccgagtacgccggtggcgacatcgtgccccaggccgatgagatcgaggacgcgcagtggttcaacatccacgacctgccgccgttgccggcgtcacgttcgattgcgcgttacctgatcgacctctacctggcccgccgtctaggccacgctgaaccagtgctgccaggctaggcgcacggtcaggccgaggaccacggtgatgaacaccgggcgaatgaatttggcgccaccgctgattgcgctgcgggcgccaaagaacgcgccgcacatcaccgaaacgcccatggccaggccaacgatccagtccaccgaaccattgatgatgaacaccgtcagcgccgccgcgttgctgacgaagttcatgctgcgcgccacgccgctggctttgaccaggtcgatggggtgcagcagcatcgtgctcaccgtccagaacgctccggtgcccggaccggcaacgccatcgtagaagcccaggccgaagccctgggtggcctgccatttcttcttgatcggcgcgtcggcatccagcggcgccttgggtgtgccgccgaacagcaggtacacgccacaggcgaacacaatcaccggcagcatcttgttcagggtctcggccggcaggtagtgagcgacgacggcgccggtcagtgcgccgatcagcgtgccgacgatggcgtgcacccattggcgcgggtggaacagtttgcggcgatagaaggtaaaactcgcggtggccgagccgaaggtggaactgagcttgttggtacccagtaccaaatgcggtggcatgccggcggtgagcagggcgggggtggtcagcagaccgccgccaccggcgatggcgtcgatgaaaccggcaatgaaggcaaccaccgccaggatggcgagagtggtgaggtctacgctgagttcgaagggcatgggcagggcttattcttggcgggcgctatgcgaaaggccgccatcttactcgcggggactcagcaaatccaaatgtgggagggggcttgcccccgattgcggtgttccagctaactcatctgtagctgattcaccgctatcgggggcaagccccctcccacattgttactgcgtcgacttacgatcgatgtgtgtcgatccactccagcgccgtacgccagatacaaattccgaggaaatacgccgacatcaccgaccacaacccaaacgtccacgggttggtgttcgggtaatccaccaccatcaggaagctgcacagcaaccagatcgtggtcaccgcgatattgatcggcatgaaccgcttcacccggaacggatgcaggaacttcatcggtgtcacggtcagcagggccaggccgatcacggtgagcaaggtgacccaggcttccggctggatgatatacacgcacagcgccaccacgttccaggcggcggggaagccgacgaagtagttgtccttgctcttcatgttcacgttgcagaagcagaacagcgacgacaccaggatcaccgacactgtaaacaggtgggtgaagtccggcaggtcgatatagcggtagataaacagcgcgggaatgaacacataggtgaggtaatcgatcaccaggtccagcaccgagccgtcaaagcttggcaataccgtgctgacattcacccggcgcgccagtgaaccatcgaccccgtccaccaccaatgccaggcccagccacagcaggcaggccttcggcgagttttccagcagcgccagggtggccaggaaggccaataccacgccggtggcggtaaagccgtgggcgccccaggctttgagtctggctacatgcagggtcgatatcacgggcggttctccaaaaggtgaaacggggcagccgacaacgtgacgccgtcgagtctggccggggaatgcaggtatcgaccgggaagggggtaagaaggttcaccgccccggcgtatcacttagcgtagcaagcgtaagacgtttcggcatcagccctggcggaacaccagggccttcaagccactttgcgggtcgatgtcgggaaactccggtgggtttgccaggcgttcaacgaagtgcaggcccggtgcttcgcgggtgacgccgtcgatcaggaaatcttcgccgaaggccgggtcgttcatgcacgccagcaccgtgccctgcggcgtgagcaaatccggcaggcggcgcagcacgcgttggtagtccttggtcagcaggaagctgcctttctggaacgagggcgggtcgatgatcaccaggtcgtaggggccgctgttggtcactttggcccaggacttgaacaggtcatggcccaggaaactcaccttgctcaggtcatgaccgttgagacgatggttgtcgcggccacggctcaaggcgccgcgggccatgtccaggttcaccacatgctcggcgccgccttcgatggccgccacggaaaacccgcaggtgtaggcaaacaggttgagcacacgcatgcccctggcctgttcgcgcacccaattacggccgtagcgcatgtcgagaaacagcccgctattctgtttcttgcccaagtcgatcaggtagcgcaagccgccttcgacgatgatttgctcttcgacgggctcgcccgccagccattcggtggtgctttgcggcaggtagcggtgttgcagggcaacggtataacggccgaactggctgtgcagcagctgtttcaaggcgtccagttgcgcagcgtcgggctccttgaacaacgacaccagcagcacgccttgcagccagtccaccgtcagttgctccaggcccggccagcagcgaccacggccatggaacaggcggcgggtttcgctcggtggcgtttgcagggcggcgagcaaatgagcgtgcagggtggcgagtgcgtctgggttcatcgttaaacgtcagtcattgagcgggcggcattttaaacacagttgcagggtcgtgggtggcttgagcacaacgtgctgcgaaaaagccatggcgcagtgattcatgctcaaaatgctgaaaacagcgcctgataacaggcaaaacatcctccggcgccgacataaactggaaaaaaagcccggaggtgcccatgaacggtttcacgaaagcgctgattgaccagcaagagctggatgaatggcgcgacgccctggcctcactagtggccaacgccggcgccgcacgggcacggcaaattctcgacctgctggcccaggatgccagtgccccgcacatcgactggaaaccgcgccatggcacgccctacatcaatagcatcagcgtcgagcagcagccggcgttccctggcgatctcgctaccgaagaacgcctggcttcactggtgcgctggaacgccctggccatggtggtgcgcgccaaccaggcctatggcgaactcggcgggcatatcgcgagttacgccagcgcggcagacttgttcgaggtgggtttcaaccatttcttccgtgcccgcagcgacggctttggcggtgacctggtgttctaccagccgcattccgcgcccggcatttatgcacgggcattccttgaaggccgcttgagtgaagccgacctggcccactatcgccaggagatcggcgggcccaagggtggcgcacgtggcctgtccagctatccccacccctggctgatgccggacttctggcagttccccaccggttccatggggatcggccccatcagttcgattttccaggcgcgcttcatgcgttacttgcaacatcgcggcttgcaggacaccaccgaccgccatgtctggggcgtgtttggcgacggcgagatggacgagccggaaagcatgtccgccctgaccctggccgcccgcgaaggcctggacaacctcacgtgggtggtcaattgtaacctgcaacgcctcgacggcccggtgcgcggcaacgggcgcatcatcgatgaactggaggccttgtttgccggcgccggctggaacgtgatcaaactggtctggggctcggactgggatgcgttgctggccaaggatgccgatggttcgttggtcaacattttgtccaatacggttgacggccaattccagaccttcgccgccaaggacggcgcctacaaccgcgagcacttcttcggccagagtgactccctggcccggctggtcgagggcctgagcgatgaacagatcgaccgtctcaagcgtggcggccatgacatggtcaagattcacgcggcctaccacgcggcgcggcgggtcaagggcaagcccacggtgatcctggcccagaccaaaaagggcttcggcatgggtgaggccgggcagggcaagatgaccacgcaccagcagaagaagctggatcgcgatgcgttgatcgccttccgcaaccgcttccaattgccgctgagcgatgaacagaccgaatccctgagctttttcaaaccggcagacgacagcgttgagctgcgctacctgcaccagcggcgcaccgcattgggcggttacgtgcccagtcgacgccaggtcgccgggcccgttaccgtgccggcagtagcgggctacgccggtttcgccacggccgccgacggcaaggaaatgtccaccaccatggcctttgtgcgcatgctcaccaacctgctcaaggacaaagccctgggcccacgcattgtgcccattgtcgcggacgaagcgcgcaccttcggcatggctaacctgttcaagcagatcggcatttattccagcgtgggccagcgctacgagccggaagacatcggctcgatcctcagctaccgcgaagccaccgatgggcagattctggaggagggcatcagcgaagccagcgccatcagctcctgggttgcggcggccaccagttattcagtccacggcctgcgcatgttgccgttctacatctattactcgatgtttggcttccagcgcgtcggcgacctgatctgggccgctgccgaccagcgtgcccgtggcttcctgctcggcgccacggccgggcgcaccaccctcggtggcgaaggcttgcagcaccaggacggcagcagccacctcaccgctgccaccgtgcccaactgccgtgcctacgacccggcgtttgccggtgaattcgcggtgatcctcgaccacggcatgcgccagatgctggagcacgatgtggacgagttctactacgtgaccctgatgaacgaaaactacccgcagccgagcctgccggaaggcgtggaggcggcgatcatcaagggcatgtattgcttgcaaggtacggccgacgccaaggtacgcctgttgggttccggcacgctggtgcgcgaggcgcaagcggcggcgcagttgctggcggaggattggcaggtggcgagcgaggtgttcagcgtgaccagtttcagcgaactggcgcgggaagcgcgggagctggaacgctggaatcgcttgcatccgcagcagacggcacgtgtcagccacttggctgaatgcttgcccaagggggcgccggtggtggccgtgtccgactacgtgcgggccgtgccgcagatgatcggttcgtatctggattccagctacaccgtgcttggtactgatgggttcgggcgcagtgatacgcgggcggcgttgcgcgatttctttgaggtggatcggtatcacatcgtgctggcggcactgacggcgttggatgcgcggatgtgtcagctggcgattgagaagtacggcttacagacggagcgtgcggcgtcctggaactcctgacaggcgcaaatcaaaatgtgcgggctggtttttagagggtcgctatcagggccggcccaaacgcttccttgaggaaacctggggcgatatagcgctcgtagtgcgcttcggacagcaggaaaaactcgcggtcgatggcatcccgcaggtcggccagcgggcgctcacgaaactccggcagcaacaccaacccatacgcctccagcctggaaatcacccgcgcgccacgggcaatcagctggtacgcccagcaatatggcgattggtgcggcataaagcggatcttgcgattttccagttgctggcgcagcaggtgcgcgtcgaacacttccagcttgctggccatcacctgcaccagcagttgctccaggcgcaaccacaccgcctgtttttcttcggcgttgtagccgttccactggatcacttcgtggtgatagcgcttgcagccccggcagaccaggtctccgtagacggtggagcacaggccgacgcaaggggtcttgatggtttgattgggcataagaggcaatttgcaaagatttatcgcgcaccgcaacccatgtgggagggggcttgcccccgattgcggtgcatcagtcactgaagcttgagctgaacgaatgtcatcgggggcaagccccctcccacatgtggagtcaatcccagctcagcgcgccgccagtctggtactcgatcacacgggtctcgaagaagtttttctctttcttcaagtccatgatttcgctcatccacgggaacgggttggtggtacctg

SEQ ID NO: 8 - DNA, 714795 bp, Pseudomonas nodulensis
  misc_feature (47746)..(47776): n is a, c, g, or t
  misc_feature (290407)..(290446): n is a, c, g, or t
  misc_feature (451955)..(452030): n is a, c, g, or t
  misc_feature (456123)..(456189): n is a, c, g, or t
ccgcaatagaagaagatgccttccagcacgcagtagtaggcgaccaggttgcgcagcagttctttgtcggtctcgacggtgccggtttcgaacttcggatcggagatcgagcgggtgtatttgaggccccaagcggcttttttggccaccgatggaatctcgtggtacatgttgaagatctcgccttcatccatggccagcgattcgatgcagtactggtaggcgtgggtgtggatcgcttcttcgaaggcctgacgcaggatgtactggcggcactccgggttggtgatcaggcggtacacggccagcaccaggttgttggcaaccagggagtcggcggtggagaagaagcccaggttgcgcatgacgatgcgacgctcgtcgtcggtcaggccttcggggtttttccacagggcgatgtcggcggtcatgttgacctcttgcggcatccagtggttggcgcagccgtcgaggtacttctgccaggcccaatcgtacttgaagggtacgagttggttgaggtcggcgcggcagttgatcatgcgtttttcgtcaacggcgacacgggcggaggcgccttcgagttcggcgaggccttcggcgacgtcgagtttgtcgagggctgccttggcgcggacgatggcggcggagtcgttggcggtcacgttacgggcttccagcgcagcagcggcgccggcaccgtcgaggcggtccatgttggcttcgctggcgtggccggcgttggcgcccttgatcaccgctgcaccggtgtcttcgttgtcgacttcatcccaactcagcatggaaatgctccttcctggtattcgaaaaataagtgtttttgcaggcttcaaggcattgaaatactgcgcatagtgtggtcgataaataccgatactgcacactatgtagtggtctgttctgtttgtgggcacactatatggtgtgtaacaagactggtcaacgtgcaggaatcacgcaggcctgctttaaaggctgatcttgatctgcgcgcacaacccaccttccggccggttgctcaacgtcaacgaacccccgatggccaccaccagttgctgggcaatcgccagccccaggccggtgccgccggtgccgcggttgcgtgagctttccacgcggtagaacggctgcatcacctgcaccagttcgtcctcggcaatgcccgggccgttgtcgagcaccttgatcgacagtgcaccatcggccgtcgaaccgacctccagttgcgcggcgccggcgaacttgagggcgttgtccaccaggttcaccagcacccggcgcagggcgtgggggcgcgtgtcgagtacgaccgcgcttttgccgctgaggctcacctgtttgtgcatgtcctggtagtcgaacaccaggctgtcaaggaaggcgtcgaggttgatgcggtggctggcttcggtggcgccgtggacgctgcgtgcgtaggccacgccctcgcgcacaaggtgctccatctcgccaaggtcgctccagagtttgtcgcgttcggcacaatcctgcatgaattcggcgcgcagtttcatgcgcgtgatcggggtttgcaggtcatgggaaatcgccgcgaggatctgcatgcgctccttgaggtattcggcgatgcgctgttgcatggcgttgaacgcaaccgcagcgtgggccacttcggtggggcctttttcgtccagcggcgtggggtgggcgttggggtcgagggtttccacggcgcgcgccaggcgggtcagcgggcggatggccaggcgcacggcgaaccaggtgcagcccagcagcagcgccagttgcagcaccagcaccaccggcagccagtacgcgacgggcagggcggcgggacgtacgtcgagggtgatcgggctgccatcggccagggtcaggtgtgcctggaagtgcttctgcatcccggggatgtcgcggaaggtcagcgcgtagtgttcacccaatgcatcggcaatcgaggtggcggccatgggcacgtcgtcgctgcgcatcggctcgccggtttcgccggcgttgagcaggtagcgatagttttgccggtcgagacgcggcagccaactggcgcgctcgttggcgggcagccggtcaaggatcgccaccgaggtggccacgtcgttttccaggttgcccagcatgacggtgcgcgcgctgatatagcgctcatagaactgcgcactgaaggacaagccatgggcgcacaccaggctgatcaggaagatcagcgacaactgcgacgccagggtacgcggccagccaaaccttaaggtcattgatcggccccgaggatttccaccggcagggagaacacgtagccctcgctgcgcacggtcttgatgtaggccggttcgcgggcgtcgtccagcaggcgttggcgcaggcggctcaccagcaggtcgatggaacggtcgaacagatcggcgtcgcggccctgggtcaggttgagcaactggtcgcggttgagcacgcgttgggggtgatcgaggaacacccgcagcaggcggtattcggcgccgctcagggcgaccagggtgtcgtctgcgtcgagcaggtggcgggcggtggtgtccaggcgccagcggccgaagcggatcagccgcccggtctcgctgactaccaggttcggcggcagcattcgtgtgcggcgcagcaccgcgttgatgcgcgccagcagctcacgagcggcgaacggcttgaccaggtaatcgtccgcgcccatttccaagccgatgatgcggtcggtttcatcgttgcgtgcggtcagcatcaacaccggcgtggctttgtgcttgcccacccgcagctcgcggcacagctgcaaaccgtcgtcgccgggcatcatgatgtccagcacgatcaggtccaccggggtggtatcgaggaagctgcgcatctggcggccgtcggcgaccacggtggtgcgcatgccgttctttttcaggtagttgcccaccagttcgcggatttcccggtcgtcatcgacgatcaggatgtgatcgacatgatccatgctgcctccctcgttaaatgctcgttggggcgcagtctagccattggcgacggacttgccttgtgccctttgtattgcagtgtatctggcgataaggagatacatgacgaggcaaaaataccggcgtgaacgcctacagggtgcgcgaagcccccggcaacagggcttcaaacacttgctgcacctggggatcatcgctgtgggccacgttgaaacgcatggcgtcacggtgcgtcgcgtcatagccaaacagtgtgcttggcgccagcaccatgccctgtttcaaaccttcctgggccagtcgttcgccgttcacgccgggcggaaggagcgcccagataaacatcccgccttcgtagcccatcggcagttcgcagccgcaacgccgcagccattgttcgacccgtccaccggcctccatcaagcgctgcaccatgcgtttgcggtgcctggcgtaactgccttcgctgagcatgtggtacaggagctgctcgaacagctccgaggtcacgccgccactcatcagcttcatattggtcaggttggccgccagttgcggtgccgccaccacgaagctgacgcgggcgttggcgctcaggctcttggagaagcccgacaggtaagtgacctggtccaggccggcgagggctgccaggcggggcggtgggttggggtgcaggtcgccgtagaggtcgtcctcgacgatatggcaagcgtattgctgggtcagttgcagcaggcgaaacgcctggccggggctgaaggtatgaccggtcgggttttgcagcacgctggtggtcaggtacaggctgggacgatgttcggccagcaactgttcgagggccgcgaagtcaaaaccgtcgggacggcgctggatcgtcaccaccttgaccccgtgcagcgccaggttggcgtggaagttgaaatagcacggcgtgtccagcagcacggtgtcgccggggcgcgccagcaggcgcatcaacatgtccaggccttgcaccgtattgggggtagtgatgatctgttctaccgagaccgacaaaccttcgccgtgcagtttctgttgcagcgcctggcgcaacggcagcagcccggccggcgtacccatcccggcgatacgtaacgaaggcgcacgcaccacgctgcgcatggcttggcggatcgcttcgctgtccagccaggcctcgggcaagtgaccaccgccggggcgcaggtcaccgtagaccgtggcaagggggcggcgcaagacgctcaacaggtcctggggcagcaactcgacccaggcggccagggccgggcggacgcggtccgcggcgacgaaatagccgcggccctggctggaggtgagcaggttgcgcccgcgcaggcggtcgagggcttcgttgagggtgaacttgctcacgcccagggtctgggtcagttcacgcaccgagggcaacttgctgccgggtgcccattcgccgttttcgatggcctggctgaacgcctcgacgatctgttgcactttgggggtgccctctacaaaggcgatggccgatacgaacatacagcttccttatctttgccggtgattttaccggtgaagttcgggcggattaggcctcactttacctgccttgcgcaacgccgactgcctagactgcgcgctctattcctcaggtctatggccatgacaagcgtgttgaccctttcgtcgtttctgtacttcctgctgttttgcgccaccatcaccttcagccccggacccatgaccctgctgctcttgagcctgggcctgcgcgacggcctgcgccgttcgatcccggcgcagatcggcgccagtgtgtcgtacctgatttcgatcctggtctttgccgtgggcttctcggagttgatcaagggcaacctggcgatcacccagggcatccagctggtcggcgtcgcctacatcctctacctggcctacaaacagtggaccagcagcggcctggcgctggaccgtgccggtgcggtggagggcgcgcgcagcctgttcggcaagggcttgcttaccgggttttccaaccccaaggccatcatcctgttcagcgcggtgttcccgcagttcgccggcgtgggggggcacagttcggcggtggacattggcattctcgggctgacgttcctgttgctgcaattcgccagcggctgcctgtattgctacttcggccagcgcatcaagcacgtcttggaaaaccccaggcggcgtgtgctgttgcaacgcatcacggctgttttgctgttgggcgtggcgttgatgctggcgcggggctttgcccactgagcttatgagcggtagtggcgaattgccggtgcgctgatagactcctggcattcactcaggatttcccccccccccatgtcagctgcagaaggaaacggacttccgctcgcttcacggctgtacaaatcccgcaccctcgggctgacgctcggttttgtctgcgtggtgttcgggatgtatcccctggaccccgcctggtgggtgtgggcctggatggtgatcaacgcgttcatctggccgcacctggcgtttcaattgaccttgcgcaccaccaacgcactgcgcagtgaacggcgcaacctgctgttcgattccttttgcggtggcttctgggtcggcgccatgcacttcaacccgctgcccagcgtgaccacgctgtcgatgatgaccatgaacaacgtggccatcggcggtccgcgcttcatgctggcggggtggctggcgcaggcgctgggtatcggcgcggcgctgctgatcttcgcgccggcattcattgccgtgaccagccaggcgcagctctacgcctgcctgccgatcctgatgctgtacccgttggccctgggctggatctgctaccgccaggcggtgaccctggcccgccacaagcgtgaactgttggtcctgagtcgcaccgacagcttgtccggcctgctcaaccacggcgcctggaaggaccaccttgagatcgagttccagcgctgtcgccgggattcggtaggtgccgccatcgcgctgatcgacatcgaccatttcaagaccatcaatgacacctacggccatgtcaccggcgatatcgtcctgcgccagctgagcaaagtgctgcgccagaacctgcgcgccaccgaccttgccgggcgttacggtggcgacgagttctgcgtgatcctgccgggcatgccgctcaaccgcgccaccgaagtgatggacgccttgcgcgatcgcttcaacgccttggcctacgcccaggacccgaccctgcgcgccagcctgagcatcggcctggcgccgtatcaaccgacccacgcggattcgaccagttggctcaatgacgccgaccaggccttgtacgacgccaaaagcagcgggcgcaaccgtgtcagtgcggtgcaggagggttggttgcgatcggtctagtggggtagggtgtctcggcacctccaacaaaaaacaaggatcggttcatgctcttcactttccgccgtaccctcctggccgccaccctggccatgtccttcgccgtgccggcctacagcgccgagccccataaacagatccaggcccaatccgaacactacaaggccgacgccctgaaactgctggagcgcctggtcaatatcgactcgggttcaggttatgaaccgggcctgacccaagtgcgcgacatcgccgtggatgagttgaaacagctgggcttctccatcgagctggtgccggacaaggccgccaacaacagccacgtggtcgccaccctcaagggcaccggcaaagccagaatcctgctgatggcccacatggacaccgtgttcaaggaaggctcggccgccgagcgcccgttccacatcaaggacggccgcgcctatggccccggcgtgatggatgacaagggcggcatcgtcgccggcatctacgcgctcaaagtcctcaaggaccagggcttcaaggactacgcgcaaatcaccttcctgctcgacgccagcgaagaaaccggctcggacgccgcctccgagctgatccgccaaaccgccaaggcccacgacgtcaccctgaacctcgaacccgggcgcccagccgacggcctggtggtgtggcgcaaaggcagcgccaccgctgtggtcgaagtcaaaggcaaagccgcccacgccggcgtcgccccggaactcgggcgcaacgccgccatggaagcggcgcaccagatcctgcaactgggcaagttgggggatgctgagaagaaaaccaccatcaacttcaccgtgatcaagtcgggcgaccgtaccaacgtcattcccgaccaggccaccgccaaggccgacgtgcgcgcggcattgccggaagagtttgatcgcatcgagaaagacctggcacgggtatcggccaacaagttgatcccggaaacggaagtgaagaccagcttgcagcgtgggctgccaccgatgccgcagacgccggagtcggacaagttggtggcgattgcccaggggatttatggggaattgggcaggacgttgacgatcgaaggcagtggcggcgcggcggatgccagcttgtcagccggggtagggacgccgacgttggacgggtttgggattgtcggcgggaatattcacacaccggaggagtatgcggaggtggagagtgtggtgccgcggttgtatctgttgagtcggatgattatggaactgagcgagcgctgactgacgctcttttgtggcgagcaggcttgccctgcgttgggctgcacagcagccccaaaacagacaatgccggtttatcagaaaacactcatcgcctggattggggccgcttcgcggcccaacgcgagcaagctcgctcgccacataagcgggtatcgcgtcctttggcaccggttagattttttcatttttaattttggaggttctatttttaagtgttgacacgacatgcctcaaccaagttaggccgtcaggccattcgctgcgataataatagtagcaacctatatcgctgaataaataagcttccagctcttgctctgtctttccgctgcgcattaacttatctagttctgtttgtacttttaatatcgtgtcttcagatgagtcggagacgaaaaactctataacatcgtccgctttttcgtggtcgtcaacccagtcttgattgaagtaaccagcaaaaaactgttgtggttcgggatagtattggttcatgggtttgaaaatccagtatgaattcggtagccagtatgcatgttaggggctttacggattatcaggtaaatttcctttcccgaaacggctgatgtgctgttctttttgaaacttgtacctacgggatgtttggttttttgaatgatgatgatttgattgtttttcccttttaaaaagttatcgattttagctttgttttcatccagtacggtcgatatttcccgctctgctgttgctctgtcatggaaggctgaggcagccgggatgtgtggctcttgttgtggtgagcaggcttgccctgcgttgggctgcgcagcagccccaaaacagacaatgccgatttacctgataaacacccatcgcctgaatggggggccgcttcgcggcccaacgcagggcaagcctgctcgccacagaggggttgtgttgccttggagggcggtgtttggtttaccaggttgactggtcttcgaggctggctttttgaaggtcttctttccagaccttgttggcgagtcgatagatgtcgacgaagaagcctcgggggtcggctatttctgtttcggtccaagccatggttatgtacttgtcgtaatcgttctcaaattctttcgaaaagtcaaagtcggggttgtctagtgcgtctttgagagaagaaatcaatataaaacgatgcctgtaggaaaggtgcataaggtctttcaggacgaaagaaattatgattttttccctgtcttgatgattgttagggtcatgcttccatagctcttttccaaccgtttcctcaaggtcgtatatcgataaggctcctaataaatgagagacattaggagtgtatggtgtgtccatgaatggggatttcagcatggtctgctcacttcgggaaagcggtgaatggtcgagtcggattgtgtcgatcaaatctgatttctgctctgtccatgttttcaatgtatctggggttgttcaagtccccggtattaggtttatagcctcgcccggccccaggcagttcgaccacgaccactgggttgcctgcattatccaaacctgtgggagatggcgaatcgccctgcatcctgcccaaggccttgtttatagcgtggagttgcattttccaagagttaaattgggagctggagctgatatacccgctctccccagtcgttggatttgttccatcaatagatcgttgttttaacgcgctatctggtatctctgggccatgcttttcaaccgtatgcatatcgtattcctgctcccagctcagcacccttcgttttgcatttgcctctgtcagtgcatctattctcgactgtccattagttcgcggtagttgaggtagagcaggtgcgccttcatcgacgttaggcctccgaagggtaggaggaacgttaggtttacactcgtcgccagggcagctacttaagcccagcggatctacccatccggtagggttaggcacgtactggtacgcattgatcccacccgccagcttcaccggatccggcgtcaggtaacggccaacatccggattgtagtagcgatggcggttgtagtgtagcccgctttcctgatcgaaatactgaccctggaaacgcagcgggttgtcgatttttccgatgtcgatgcggctgatttcgccgtaggcacggtaatgcgtagaccagacgatttcgccatccggggcagtgagttcctgtggggtgccgaggtggtcgagttggtagtggtaggccttggtttcctttggaccgaaaccttccaataaagccagcgggcgaaagctgtccggttcgtagaggtagctgcggtgccgatccgcgtggtgttcggcgatgagtttgtcgccttgccagaagagttcggtcgtaatcccatctacggttttactgatacgccgcccaaacgggtcgtagcggtagctggcagtctggccgttgggcgttttaatgccgatcaggcggtgctgacagtcgtagcggtattcggtgacgagggcgtggcctttgccgcggcgttcgcggatgaggttgccgaaggcgtcatagtcgtaatggtggtcgccctggatcatcaggcggttgccggcgacgatgtcggggccggggcggttgtgcatgagcaggttgccggcggggtcgtggccgaagcgttcctgttcgtcttgagtgtggtcggcgcgggtaaggcggttgagtgcgtcgtagtggtagcggtgttcgcctttgcgggtatcgagcaggcgggtgaggttgccggatttgtcgtagtcgtagtggcggcggtagagcgggccttcggcgtcattgatgctctggttgaacaggcgtccctggtggtcgtgttggtagtggctgagcagttggccttgttggcgttgctgttcgcggccggccttgaacaggtgtgaggtaagaacagcgccgttcagttcgacggtggcgaggtggccgcctttgtcgtgattgaaggtgaggcggttgttgtccggcaggcgcaggttttgcaattggccgcaggcgtcgtaggcgtagcgcagcgtgccccagccttggtgttcggcggtgaggcggttttggctgtcgtactcgtaggccagggaccagtggccgtcttctacgcctaagagattgccttggcggtcgtaggcgtaatcgacggtattgccatcgggcagggtttttctgatgaggcgtccggcatggtcgcgctcgtagcgggtaaccagctgactgccgtcatcgccgtgttcggtcttttccgaaaggttgccattaaggtcgtaaacgtaagcggtgcgctggccgtcaaacccggtttcctgctggatcaggccgttgttgtggtactggagccggtaggtctcgccaacttcgttttcgatttcggtcagcagtaaccgcgcgttgtcgtagcggtagttgacctgagtgccatcggcattgatgcggcggctgatcaggtgcaggccgtcggcgtattcgtagcgggtgacgtgcccgagttcatcgcgctcggcggtgatttttccgtaagcgttgtagctgtattcccgatgcgcgccgcctggcagcacaacgcgaatcaaccgacccacgctgtcccactgatactgggtcagcgcgccatgttcatcttcccgcgcaatctgtcgccccagatcgtcatagcgataacgcttgatcccaccattgggcaactgctcctcaagcaactgcccacgctcattccacaccagccgatgacagctgtggtccgggtaccaaaccccaaccagttgcccgtatttgttgtagctgtagtcagtagtgttgccatcagaatcggtcttgcgcgttacatcgccttggtcgttgcgctcatacttccaaaccgcctgaccccgccttacaacgcgtacgaacccgttgtcatgctcgtaggtcgtcggctcatcgtcccccggaaacaccgccaccaagcgcccagcttcgtcgtactgatacgccgtgatcgccccgagcgggtcctgctcaaccgtcagccggcctttttcatcgtaggatttgaaatgctcggccccgtcaggatcaacccgctgcaccagccgcgcccgttgatcgtgaagatagacttcctggctgccatcggcgttaaacaccgtgacctggccgttgtcatcccaggcatagcgcgtgtccatctgcgagaagctggcccaatgccgcacacaccgcgccgccttgccagaccgttcccactcccaatagaaactcgccccaccggccaagtcgcgttcaagaatgacgtgctgttcgtcgtaccgataaacctcgctttcgccgatggcattggtcgcgcaaatcagtcgtccagcttcgtcgtaggtgtaggaaacaacggtctgttccgtcacccactcaaacggctcgagacctttagcccgatgaacctgatagtccaccgccacgatgcggcccgacgcatagcgcaaccaaagcgaacgcccgacaccgttatccacccgctcaacacgccccagaaaatcccgagtgatacgcagccggttgtcatacgcatcgctgatcgccgtcagcacaccgtcgcggaagtggtagaaacgtgacgcctgcgccagcaccagttcatcgggcgcagcacccaaatagatcgccgcttcggccaggctattggtgatcgcaggtcgagaggcagtaggcaagggcagggtggtcgaccgattctcatgatcggtccacaccatcgaatcaccctcaaccaccagccgatgcgccagcgagtgactccagccaaaccccagcccgcaatccattttcaccgcactggtgcggtacaaccgggtccactcaaacggcaagatcccgtccagcgtcccatcggtaagggtcagcaattcctcgccggtgaccatcgacaccgggcagccgttagtggcggtcttgtccgcaggcgccgccgcatccccattcgggtttcgagcagaagccggcacatcatccacaggctcctgccgcaccagcaccgtccgctgcgtggccttatcccgaaccaccggcaccgcgttggcaaccacctgatccccagccttcaacggcacatccggaaccaccctgatcggcgtcgcacgactccccagcagcaacggcctggccgcctcgacatgcgcgtccaaccgaggcccgaccaactgttccgcgagcatctccagccactggcgagcccggccagacttgatgtgactcgtcacctgagcacccaggcgcagggtcacccccatggcgcccgcgaccctcaccaacagcagacctatcaacacgtcgccggtgatttcccccatcacctcgctcatcgcttgcggcggcaacatccgtatccaactgcagatcgccgacaggtagataaacatcaacggctcatcgctgagcacgagcaggccctgggcgatggcgtctttgcccagtttcagcagttcatccagttcggcctgggagacgtactgcagcaacttctggctgttgctctggaggtccgccagcagctcggacagttgtgtgaaattgtcccaaaggctgtaaagcgccttacccattccattaagaaacgccttctccagcagcctgcgttgatcaagcgggctggcgtctgtgtagtctttccactgggcttcgaaggtgtttttccactcctcgcgcaggcgtgcgtccaatgcatcaatcaccgattgataggatgcatacagtgccttgacgtggtccttggaaacgttgggatagaagctgacccggtatggctggtcgcgctcacactcgtcgatttcgagaatgccgctcgggccgatggttttgtggatcggctcgcccagtggcccgccgttggggtcgacacgctgcaacatcaccggcgtgttgccgatgggtacgaactgcgtgctttggaacaggtgcaccagggtcaacttgccgttggcctggcaagtcgcaacggtggtgcttgggtatagagaacgattgatcggcgcgaccagcgccacttcatccccgaccttgaagacttgctcgacatccagcgccgacaggctccaaaagctcgaagcccatgcgtcaaaggtattcaggcattcccggaaatcgcgaaagacgcgctcgatatcgaccgtcttcacatccattggggtcagggccagcctgccaatggccgggttcaagaaacagctccaacaaccagaaagtccatttgcaatccctcgcactgtgtagtcaggcgagggactttgcggaccttttcaggggaggggagtagagcttatccggcggttacgtgggacgtttcgacaacgctcgtcttctctcgccccaacaccaggctgcacagtgccggcaagaacaacagcgtcagcaccgtgcccaccaacaccccaccgatcagcacgtaggccagggacgaccagaacaccgacaatgtcagcggaataaacgccagcgccgccgccagcgcggtcaggatcaccggccgtgcacgccgcacggtggcctcgacgatcgcctcgcgaatggccatgccgtggtcctggttctgacggatctggtcggtgaagatcagcgtgttgcgcatcaggatcccgccaatcccgatcaagcccaggattgcattgaacccgaacggctggttgaacagcagcaaggtcggcaccgctccgatcaaacccagtggggcggtggcgaagaccatgaacatcacaccgaacgagcgcacctggaacatgatcaccgtgagcgtcagcaggatcatgatcgggaacagcgcggccagggcgacgttggccttggcgctttcttccaccgggccgccgatgtcgatctggtagccggccggcagcttggcgatcagcggttgcaggtctttgtacacggccatttccacgtccggcggttgcacgccgtcgatgatgtcggcgcgtacttcgacggtggtcgcgcggttgcggcgctttaggatcggttcttccatcaccgcctggaaatgcccgacctgggccagcggcacggaggtgccggcgctgttggtgagggtcatgttgttgaggttgccgaggtcttcgcgttggctgccctgggcgcgggcgaccacggacacagtgcggttgccttcgcgcacctcggtgatggggttgccactgagcaacgcgttgagctgggatttgacctcgttgggggtgaagcccagcagacgcaggcggtcttggtccagcaccagacgatacccgctggtgcgctcgccccaatcgaggaaggcatccttggtcagcttgttggcggcgacgaccttgcgcacgtcttcggagatgccacgcagcacatccacattcgggccagacacacggaacaccaccgggaacggcacgggcgggccgaacagcaactgcgtgacgcgcacccgtgccgccgggaactcaccggccgcaatccgctcgcgcatgcgcagtttcaatgcatcgcgggcatgggagtccggggtctgcacgatcagcttggcaaacgccgggtccggcagttcagggttcagcgacaggaaaaagcggggcgcaccgccgcccacataagtgtcgaccatcgtggtttgcggctcttgcagcagggctttttccagctgtgcggccaccgcttcagtgcttttgaaggcactccctggcggcatgtacacctcaagaatcagctcggaacggtcggagttgggaaagaactgcttcttcaccacgcccatgcccagtacgcacagtacaaacgcggccaccaccagcccggtcaccagccaacgcccgcgcacgcaggcttccaccagcgtgcgcagtttctggtagtagcgcccggcgtagatcgcgtcatgcccgccgggcaccggcttgatctgtggcaacagtttcacgcccaggtatggcgtgaacaccaccgctaccagccaggaggaaatcagtgcaaagccgacgatccagaagatattgccggcatattccccggcaccggagcgcgcaaagcccaccggcagaaagccgatgatcgtcaccagcgtaccggtgagcatcggcgccgccgtggagctccaggcaaaggtggcggcgtggatgcggtcgaaaccttcctccagtttcaccaccatcatctcgatggcgatgatcgcgtcatccaccaacaaccccagggaaataatcagcgcgcccagggtaatgcggtcgaattcacgcccggttagcagcatgatcacaaacaccaccgacaaggtcagcggcaccgcagcggccaccaccaggccgacacgaaagcccaaggccaacaggctgatgaccatcaccacggcgagggcaacgaagaacttgagcatgaactcgttgaccgccaggctgatgtttttcgcctggtcggagactttggcgaagttgaccccgagcggcaggtcggcctggattctggcttcctgggccttgaggctcttgtccagctccaggccgttccagtgtttctccatgatcacgccgagcatcagcgccgggtcgccctggtggcggatgcggtagctgggcgggtcttcatagccgcggctgacggtggccacatcggcgatgcgcagcacgcggccgttgacttccagcggcacgttttcgatcagtgacaggctgtcgaacgcgccgtcgatacggatgtaggcgcgggcgccggcggtctcgacgaagcccgacggcgccacggcgttttgcgcggccaacgccgaaaaaatctgctccggcttgatgcccagcgtcgccaggcgttcataagaaaactccacgaacacccgttgcgcctgttcgccgaggatattgaccttcttcacccccggcaggttgaggaaaccctggcgcaattcttcggccatctgcacctgttgccgatggggcaggtgctcggcctccagcgcgtacagcgcgaagtacacatcggaatattcatcgttgaagaacggcccgctcacgcccttgggcagtttggcggcttcatcgctgagttttttacgggtctggtagaacaggtcctggatttcactgggccgcgtggattccttgtaggtcatgcgcatcgacacgaaacccggctgggcgatggtctcgacgcggtcgtagtagtccagttcctgcaggcgcttttccaggcggtcggccacttgctcctgcatttcctgggcggtggcgccgggccaggcggcagtaatggtcatcaccttgacggtgaaagacgggtcttcggcgcgcccgagcttgccaaacgaaaacaccccggcggcgaggatcgcaatgatcaggaacaacgtgaccgcacggtgcttgaccgccagttcagagaggttgataccgcgcatgctcagttgtcctgtttgcggttgagggccaatgcctgggcgggcagcaggcgtacggcgtcaccctcgtgcagcaggtgtgcacccagggcgacgacgatttggccgggcgctacgccgctgtcgagcagcgcgtcttcctggccgaggctggcgactttcaccggggcgaagctgatcgtgtcatctgcaccgatcacccacacgccagtgccttgcccggcgtcctgcaaggcgccgatgggcacgcgggtttgcgcggcctggccgttgccttgcaggcgcacggtgatggtcgagccgagggcgaaacgctcgatggtgccatgcaacacgtagcgagcgcggtaggtacgggtagtcgggtcggcgctggcggacagttcgcgcagagtggcggtcaccgcctggtcgggggcgccgaaggggaaggccagggctttctgcgaagcttggtcgcgctggttttccggcaggttgacgatggcttcacgggctccgtcgtgggccaggcgcgcaacgatctgtccttcggcgaccacctggccgcggtccacccgcacgtcggtgatgatgccgtcgccatcggccttgagcaccgagtaagtgcggcggttttcgatctggctggcgtcggattgcgccgcggccagctcggcttcggccacccgcaggttggtcgccgactggtcgaagatctgccgcgacacggcgccggtgctggccaggcgctggtagcggttttcgtcgtcacggcgttggcgcagttgggcctgggcggcggtgacgcggtttttcgccgagcgcagggccagttcgaagtcgccgatgtccagtaccagcagggtgtcgcctcgggacacgtgctggccggggtcgaccttgcgttcgatgaccttgccgccgacgcggaagcccaggtcgctttcggtacgtgccgcgaccacgccggtataggcgctttgctgggtgccggccgcttcgactttggcggccaggaccgggcgaggttgaggcacttcggcggcggtgtcggccttgctgttgcagccattgaggacgatcaacagggccaggggcgtgagaagacgcagggggagaggttgcatggcgggctccggggtaaccattgggcaaaaaattatggacataattttttacgcatattatggtcgaaatataaattaatccagccccccggatgttccccatgacaaacgccccggccccatcgcgaagcttgctgtttttactggtggccctgacggcactgggtgaggtctcgacccaattgatcattcccggcctgggtgccatcgagcaggcgctggtcgcgccggcaggttcggcactgatggcgttgtcggcatttgtcgccgctttcggccttgggcaactgttgttcggcccgctgtcggaccgtattggtcggcgcccggtgctgattggcggcctggcgctttacgtgctggcgacgttgtcgatgctgctggtccacgacatccaccagttcattgccgcccgcgtgctgcaaggcctgggcgcctgcgccgcgctggtactggcgcgcacggtggtgcgggatgtgtggaaggccgaagccgggccggccctggcgttgaccatgatcggcatgctctacgccatcgtggtggcgccgatggtcggtggcctgctgatcaaactgttcggctggcacgcaccaatcctgctggcgctggcgattggcagcgtggtgctgttgctggcgttgctgttttttcgcgagagcaaccactcgctcgatcccaaggccggtcactggcgcaccctcggcgggcaatacctggacctgctcaagggccgccagtaccgggcgttcgccgtggcgctggcgtgcacctatggcgccatgtttgcggtgatcgccggttcgtcggcggtgttcatcaacctgctgggcttcagcagcctggaatacggcctcaattttggcctgattgtgtcgatgctgatcgtggggtccacctatacccgccgcaacatcatgcgcctggggccgcagcggattgtagcgatgggcgtgacgatggtggcggttggcggggtgtcggccgtggtgatttatgaactgttcggcctgtcggtgctcggcctggatattccgattgccctggtcaccctgggtggtggcctggtgttgccgggcgcggtcaccggcggggtaatgcccaatgcgcatcgcgcgggcctggcagcggggctgatggggtttgcgcagatgttcggtgcgacttgcagcggcatcctgctcagccagctgcgtgacggcagtgccgcgccgatgatcatcatccaggctggctttgcgctgacggcctacgtggcgtttcacctgctgcgccaacgtcaggtcaagggattgtcctatacgtaggacgaacagggctgcttttgccggctagtgctcaacggcgggcagccttatggtgtatgcactttggaggtacaccatgaaaaagcttatcggcatctacaccagcccccgcgcccattgggtcggcgacggctttccggtgcgcacgctgttttcctacgacgccatgggcaagcacatcagcccattcctgttgctggaccacgccggtccggccgatttcaccccgactgagcaacgtcgcggcgtcggccagcatcctcatcgcggctttgaaaccgtgaccatcgtctacgacggcgaagtcgaacaccgcgactccaccggtgccggtggcaccatcggccccggcgacgtgcaatggatgaccgccgccaaaggcatcctccacgaagagttccactccgcagccttcgcccgccgaggcggtgcgctggagatggtgcagctgtgggtcaacctgccggccaaggacaaaatggccgaagccggctaccagacccttgtcgatggcgacatcccggtattgcccctggccaacgacgccgggcggctgcgcctgattgccggtgagtttgccggcacccgaggcccggcccgcacctttacgccgattgatgtgtgggacctgcgcctcaaccctggcaagcccgtcaccctggacctgcacgaggggcgcaacaccgcgctggtgatcctgcgcggcacagtgctggtcaatggcgaggaagtcgcgcgccaggggcaattggcgttgttcgagcgggagggcagccagctcacgctcgagtccaatgacgacgccaaggtgctgctgctcagcggtgagccgattgacgagccgatcgtcgggcatgggccgtttgtgatgaacaccgagcaggagattcatcaggcattcgccgactttcagtcgggtcgtttcgggcagatgtaagcacacccgctataccctggcgcggcatttcatgcgatcttcacggcattcgccctggagtcgcctggatgccctcatttatcgctgatcacccgatgctgtgcgccctggcgctgatcttgatcgacatcgccgtgtggcgtcttatttcagccaacctcgccaactggaagctggcggcgcggttggtgatctttgcggtgttcagcgccgtgctgttcaacgacggcatgaaccccatgcaactggcgccctatgcggacaacaccgccttgcacctggccgccacggcattgcagatcggttggtggctgttcgcggcgcgcacgctgacggtgttgctcggcacgctcatgatgcagcgggtcgggcataccggccgcctgttgcaggacctgatgggggcggtgatcttcctgatcgcgatcattgccgccatggcctacgtgctcgacctgccggtcaagggcgtgctcgccacctctggcgctgtagcaatcattgtcggcctggcgctgcaaagtaccttgagcgatgtgttctccgggatcgtcctcaacaccaccaagccttatcaaatcgatgactggatctccatcgacggcaccgaaggccgggtgacggacatcgactggcgcgccacgcgcctgcaaacctcccagggcagcctggcggtgattcccaactccctggcggccaaggccaagatcatcaacttttcgcgtccggcggacatgttcggcctagcggtcagcctgcaggtcagcccgcatgcgcggccgcaaacggtgatcgaagcgctggagcgggcgatgcaagggtgtcgaccgctgctgggcaagccggcgccaagtgtggcgttcaagacgtcggccagcggtggcgtcgagtatgaaatcagcggattcgtgccggccatggccctcaagcgcgaagtgcgcaaccagctttacgacctggccttccggcatttgcaggcggcgggcgtcggcttgctgtcggccactgaaaacagcgcgccaccggcgatgtccgcggcgcgcgcgttactggagcggtcgtcgattttttccaccctgcgccaggaagagaaagacaccttcagccagaacatgaccctgcacacctatcgcgccggcgagatgatcctgccggccggagaggtcagcgatcatttgttcatcgttgagtcgggtgtggtctcggtgatgttgaccaagggcgggcacaaattcgaagccgggcgcatggggccgggggaggtgatcggcgaggccgggatcctgtcggatgaggccacgctggcggatttctcggccaagacgttctgcaccctgtaccgcatcgagaaggaatacttgaagccgtgcctggatgcgcgccacgacatcggcgaagcgatgaaggccttgctggatttccgtgtgcacgccgcgcaggccttgacccaggaggcaccggtggtgccggtgaagaagggtttcctgcagtggctgcgccagcgcggtctgtgaactccagatcgtgcaggcacaatccgccaggcgtgttaccagccgcgcaggcgctcccacacctgtagttcgccggtctcagacaccgcggtgtaacagccgaactgcgcccctgtcgcacacgcatggttgggcagaatgcgtagacgtttgcccagtgggaattgcgcgaccacatccacgtcgcgcccctggaactgcgccacgccatgttcctgattggcgctgcccagcagcaatccatcgatgggcttgccgtgttcatcgcagacctggccataaccaaaatcacgcttctgcgcctgagtaccgcgatcccggctcatggccatccagcccgcgtcggtgatgatccagcccttttccggctgatggccgatcaccgtcgtcagcacgctcaaggccagttcatcggtgcggcatacgccgatgttgtgcatcaccagatcgaaaaacgcatacacgccagcgcgcaactcggtgacgccctccaggctcactgccgacagcgcggtgggggtggagccgacactcacctgtgcgcacggcatcccggcagcgcgaatatgctcggccgcttccacgcaccgtgcgcgttccagttcggcgatggcccgcagggcttcgggcgtgtccagcccgtagctttcgccggcatgggtcagcacgccgaccaggctgtcgccgagcagccgggcaatctccagcaagcgcgggtcctgcggcttgacaccggagcggtggccgtcgcaatcgatctcgatcatcaccgcaaaggtttcgccatgctcgcggccgaagtcgatgatggcctgggcaccggcaaggctgtcggtgatcagcgtcaacgcgcaaccccggcgacgcaaggccagggcctgaggcaatttgtgcggggccatggccacggcgtagaggatgtcgtggatgcccaggtcgaagaaatactcggcttccttcagcgttgaaacggtgatgccgcgggcgcctgctgcgatttgcgcggcgaccacttcagcgcacttatgggttttgacatgggggcgcaggtgcacgccgagggcattggcacgctgctgcatgcgctggatattgcgctgcattttcagcgtgtcgatcaatgcggcgggggtatccatggtgcgggctccacaatgaggggcagggggtaaattgacgccctgtccaggactggatatgttgtcttgcatgaaaaacacctctcccaacgatactcacttgatcagccagctcgaacagatcgccgagggcttgagcaagaccttcagccccttctgcgaagtggtgctgcacgacttgcgcgacccccggcactcgatcctggccatccacaacaacctgtccgggcgtgcgcccggcgacccgaccaccgagctgggcctggcgcggattgccgaccccgactacccgcaagtcatcgccaactaccagaaccagttcagcgacggccgccaggtcaagagcacctccatcggcatcaagggcgccggcggcgagtacgtcgcggccttgtgcatgaacgtcgacctctcgttgttccgtggcttgcaaggcatgctcgaacaattcggctcggtcagtggcgacaagctcatcgagtccctggacccttccggcgccgacgtgatccgtgcgcgtatcgaccagttcgccgcccgcctggccaccaccccgcgtgcgctgaagacagccgaccggcgtgtgctgatgcaggaactcaaggactcgggctgcctggacatccgccgggccatggaaacggtggcgtcccatctgggcgtgtcgcgtgcggcggtctacacctacgccaagtagcgcgccacggcctcgatctcgatcaggtaaccgtggtgcaactccggcaccggcaccaccgcgcgggcagggcggtgctcgcccagcgcggcggcatagaggccatcgaaggccggccaatgctcgacgccggctacgtacacggtgaccttcaccaggtcctgcgcggttccgccggcggcgttgaggatggccaataaattatccagggcaatttgcgcctgttcggcaaacggcgccatcaggttatgccgcccatccgggctcaccggcaattggccggagatgtacagcgtgtcaccgtggcggatggcttgtgagtaatggccggcaggctgggccgcatgggcggtctggatgatcttcatgaggcctcgcacaacagggcggcgtacttctcgatatcgacgttgccaccggtgacgataatgcccacgcgctggcccttgaagcgttcaccctgtttgagcaacgcggccaaccccaggcagccggtgggctcgaccaccattttcatgcgttgcataaagaacttcatggcgccgaccaactcggcatccgacacggtgaggatgtcgttgacctggtcgcggatgatcgggaaggtgcagttgcccaggtgctgggtctgggcaccgtcggcaatggtcgccggcgtgtcgatgtgcacgatgctgccgctgcggaacgagcgctggccgtcattgccggcttcgggttccacaccatacaactggcaatccggcgccagggcacgggtcgacaacgccgtgcccgagagcatgccgccgccacccaggccaacgaacaatccatccagcgggccggtgaattccagcagttcgttggcggcggtgccttgcccggcaaggatatgcgggtggtcgtagggcgggatcagcgtcaggccctgctcggtggccaggtcgcggccaatctgttcgcggtcctcggtgaagcggtcatacagcaccacactggcgccgtagccacgggtcgccgcgaccttggccgccggcgcatcgctgggcatcacgatggttgccggcatacccaataactgcgccgccagggcaatgccctgggcgtggttgccagacgagaacgccaccaccccggccttgcgctgctgtgcatcgaactgcgacagcgcattgaacgcaccccggaacttgaaggaaccggtgcgttgcaggttctcgcacttgatgaacacctgggcgccggtcagtgcgtcgagggtgcgtgaggtgagcactggggtgtgatgggcgacaccctccaggcgctgggcggcggaaatgacgtcgaggtaagtcggcaatggcatagggcggacctcattggctggtatggataaaatatctatatcaagacaaatagtaaaggttggtttgtgcatgttagcgttttgcacttctctgaccgctggaggattcaacattgatccgcctcaccgactacatcgccgacctctcccaatctccgcttgcaccgtgggctgacctcgcgccctgggcgctggccgctcaggcgcctgctgttgtgcgtcagttgctggctgaactgccgggcgacgattacataattgaggatgaaatcgcggtccaccgcactgccaccgtagaagcgggcgccttgctcaagccgcccctgatcatcggcgcccattgcttcatcgccagcggctcactgctgcgcggaggctgctggctggatgcacattgcatcatcggcccgggcgccgagttgaagacctccttcatgttcagcggcagcaagctggcgcacttcaatttcgtcggtgattcggtgctggggcacggcatcaacctggaggcggggagcatcgtcgccaactaccgtaacgagcgtgatgacaaggaggtgcgagtgcgggtcgacggtaccttgcagcgcaccggttgcgacaagtttggcgcgctgctaggcgaccagtgccgtatcggcgccaatgcggtgttggcgccgggggcggtgctcaagcctgccagcgtggtgggacgcgggcaggtgtttgatgctgaagcctccctataaacaccgcgttgaaaagatcatggtcagtcggcacgatattaaatagaatgaatctcatttgagactcactcgcgccgcgcaggtcgcttgccatgaatgatgctgttgttccgacccacgcctccgaactgaccttgtcgagcctgtaccgcgaccatcggagctggctggaaagctggctgcgccggcgcctgggcaacgcctgggatgctgccgacctgagccaggatacgttcctgcgcgtactcgccagcgcccagccgattgcgcagatgcaggagccgcgtgcttatctggtgaccgtcggcaaacgcctgctggtgaatttccatcagcggcgcagtcttgagcaggcctacttgaatgccctggcgagcctgccgcaagcctgcgtgccatcgcccgagcagcgctggctggtcctggagaccctgcaagccctggacgagttgctcgatggcttgccggtgctggtccgccgcgcctttctgtggagccagttggaaggcctgggctatcgcgacatcgccgaacggcttgaggtgtctgaacgcacggttaaacgctacatggcccaggcctacgaacactgtttgctggtggacctgtgagccgtgacgtcgctcgcgccgctgcccagtggttggcgctgctcgaatccggcgcggccaccgagcgtgaccacgccgcgttgcagcactggcgagacagccacccccagcacgagcagacctggcaaaaagcccagaccctgcgccagcgtttcagcgacttgccccaggccctggcgatggccagtctcgaccgtccgcaaccggggcggcgcgctgtgctcaagcgtgcattgggtatcgcagccttggtgccgacggcctggctggtcagccgccaattgcccctcgaggcgtggcgcgccgacctgcacaccgccaccggcgagcgcaagcgcatgtccttggccgatggcggcagcttgcagctcaacacggcgacagcggtggacatggaccttgcacagcggcgcatcacactcgtagacggtgagttggcgctgaatgtacccggggcggcggcgatgacggtgcagacccgctatggcgaattgcgggtcagccaggccgaggtgtgtgtccggcagctggccaagggttgtctggtgtcggtgctcaagggcgcggtccaggtacgcgacctgaacgggcaaatggcgacgttgccgggtggtcagcaagcctcgctgcaagccggcgggctcggcgcctgggcaccgttcgatgtgttgcaattgggttggcgcgaccgcgtgctgaccgcacagaaccaggcgctgggcgacttcttgcgggaattggaacgttatcgtcccggtgtgttgcgctgggatccgagcctggaaacgttgcgagtgaccggcagttttcgcctggacgacaccgacctcatcctcaacctgctggcccagaccctggggctggaactgcacgcacgcacacgctattgggtcaccctgacaccgcgcaaatcgctcacctgatgcgggtgtggtaattcttatatatccatatagaataaataaagagttatatattccttttgttgttgttgtcgatggcgcattttgagggcctgcgcattcgtgcggattgacccaacagccaaaaggaaagccgacatgaccattaaagcgatcaacgtgcgcaaccagttcaagggcgtgatcaaggaaattctgctgggggaagtggtgtcggaaatcgacgtgcagaccgcgtccggcattgtgacttcggtgatcaccacccgctcggtgcgtgacctcgaattgaaagtgggcagtgaagtgattgcctttgtgaagtccaccgaagtgtccatcgccaagctgtaaatgaccgcccccgcactcaggcgggggctgtcatgactcaagcgatcttcggtccactgccacccggtggatgcggctgcggtctctccggcggcgcatccgtcggcaggctcttgggtttcgcgttcgggtctttgtagcccttgtgcaagccgccgtccaggcgattgctcgacgagccacctttctgcggggtctggtcgaagtgttcccactccgattgctggaagcggaagatgctgtcgtcggtcggcgcgtcacggccaccgtaatggtggatttcatagtgggcgtattcgaccttgtcggcccagttgtcctgcaacagaccgtcgcccgccaagtcgcgataccagtcgttttccttctcggtggccttctgctttttgttgtggtcgacaaagtagccgatgatcccgccgaccaccgccagcaccacacccaccaggaacaacggcccggtcaacgccgccgccgtgcccgcgccaaacagcgccgcagcccccagtaccccggccgatgcaccgaacgcaccgccggccacttgcaggccgccggccgcctgggccaaggggtctttgtccttcacgccgctcttgatcgccagtgcgcccagtacgatgtcggcaaaaccgccggcaatgtccgtggccgggcccagcaccttgatcacggaaccggcgatctttgccgatttggacgcgccgagcttggccgcgcccgcagcggccaggccgtcatctaggtgggtggccaggccttcggtggcttcggtgacggccttgtcgccctcgccgaacagcttggagatgccgtcgtactggctgtccggcaccgcatcgagggccgtggcgatcttggctttgacatccgagggcagttcgctgacgcggaattcgaagttcggctcctgcatgccggtcttgccccagatctccggcagggtcttgtccagcccgaggaaatccaccaggccgcctttgcccaggctctcgccgatcttgtcgcccaggcgtacaaagtggctggagccgccggcaaaactcaggaagtccttggcgatggtcatgcgttgcgctggggtttcgccgagcttgccgcctttgcccaccagttggtaaatcccggaaaacaggctcacaccggcgcccagtgaaccgaggatgcctttgctgttgagggtgttgaacacctcgccgagcatgccgcgatcggccaccgggatgtagggtttgctcagggcggttttcaggtcagcttcgctgatcacgccgtttttctgatacacggcgcccagctcttccagggccttggtgacggcggcagatttttccttgccttgcaggccttcgttgaggaatttctccagggtttcctgggtgcggcgcggcaagtccagcacgttgcccttgagcacgcctttgagcaggccgaacaggtccttggtggccagctccttgttctcgtcggagatcttgctcgggtccgacagaatggcattcaggtcggtggtcaagccgtccgcctggatgttctgcgcggctttgctggcggccgccgggtcgaacagcgacagcgacgtcagggtatcgctgaggtctttctgcgcctcgtaggtcttgccctggctttgcaggtccttgaggtacaacacgtagtccgggttggaggtgaggtccagcagcttctgcttgatctcgtccttgttcggcagcttgttgatggcgtcgtccatcttcgacttgtagtcagcctggatggtagggtcgttgaacagttcaccgatctgtttttgcacggccttgccgtcgacgatgtcgtgcatatcggccgaggtcagctgggtctgcttgtcatcgaactcgcgccaggtggtgttgaacgggcgtttggactcctcgtagccggtgatgccgtggccgttctggtaggcggcttgcgcttcgagggcgcggaccagcttggcgcggggatcgtccttggcaatcgagccgttcttcacgccttcgcggtaggtgtcgatcagttgcgtggtggccagttcgctgacgctgagggtcggcgacttgtcgtccttttcatcggcgtgcacgccagtgtccatgttcagcacgtccagctcaccggacttgggcaggttgtgcttggtgcgggtatcgtccaccgaactggcactggaggcttcccacttggccgccacatcatcgtagagctgcgggctgagttccttggagacgatcaccttgccttcgctggtttcgtagcggatcaggccgtcgcccagttcatccggggagccgaaggtgatgtcggtgtttttcaggaagtcattcggcccggccagcttgtagccttcgccttcgctggtgtggatcttggcccaggtgtcattggcggtggcgacgctcttgaacagctcggggctgacgtcggaggacaccaccaccttggtgccgtcatgcagctcgtaggtgaggatgtggtctttctggtcgttgttccaattgaagttcttgtagtcgttcaggcccggcaccggggtgttggcatcggccagtatcgcgccgttattcagctcgccttccaccacggctttcttgccggggtcggtgtagaccgcgtgcaggccggccaggtagtcgaacagcttggggttgtcgtcgcgggccaccaccattttctggccgttgctttcaaagcggatcaggcccgggccgacttcatcctcagggcccaccgtggtgccggcgtagggtggccacacttcgttgtcgctggcgcgcttgtaaccggcgttttcactgttggacaggccggtgaagctggcataggcgtccttggctttctggaaggcttcggggttgtcgcgctggctgatgacgaccttggtgccgtcctgggtctcgtagcggatcacacccgggccggtttcatccggtgcgccaagggatttgtaatcggcgagtttgcccggcgcagtgccatcggtaccgaggctctggtagccggcattctggctggcgaccacgccggagagggacttgaagtcctggctgacctgcttgaacagctcggggctgtcctgttcgctgacgatgactttcttgccgtcctgggtttcataacggatcagcccagggccgacttcatcgggcgggccgatggccttgtagtcggccaatgccttgggcggcgtggcatccttggcggcgagttcgtagccgtcttttttacttgcatccagccccgatggtggcttgtcctgggcctcaacctttttgttgttggcgctttgcttgagcaacgcatggaactgcgcgccggacttgggcggcatgcggggaagggctttggggtcggacgagcgatcgaggggctgggtcgtcatgccatgaaactcctgctgttaccggtggggcgtatcggcaaaaacagtaacagcaggggttcggcacgcgttgcgaaaagttgtgaattgagtctgcggcagctttcaattcaaagtacgccataagttcgggagcggataagtctgataggcgcccaggatgcaggattggtacgttggcctgagccaggatactcaacgacagggacgccatgccataaatcactttccagagactacccgtgcattcagcgtcctccaccgccttgtcgatgtttcaatctccgaatctgcagaacacagacgctccctctgcggtacaacaaagaacacccgagcaaaatcgcactcgccgggatacctcaagcgcatcccggcaggatcgtgacgccccctccaacggtattccggataccgacgttccagagttatttcaacagaaagtggccacggctcggcatgagttcacccgcgacgactacttgcgcggctataacgcgccctcgtcagtagcattgcctggttatcactcatcaatgcgcgacgtggcgctcatgaggcttgcggtggataaccggttaagcccggaacaaataggtgcattacagcgcctggttgagcagcgtgtgatcaaccgttctcaacaatcggtgagccagttcacaaagataatctctacccatggcgtaaaggtgactcccgcaccgcaaagctactatctgtctatggtgaaccaggcatccggcggcgaatgcgcagggttttcacatttactctccatagcggcggcgcagggtaaacaccagacttttctgagtaatgtctattacgccatcgcaaatccgtatgcgccggaatcagaggagtttttccggaaagtcttcgaggttcaggcccgtgtaaaagatcgtgatattgcacatgaccctgcaaccgtgaaggccgccagctataccgagattgccccgcagttgttgaactcgccgtccacaaaaacgctcttgatcagcagtgaagggcatcgcctgaccgcaggcgtcatcgttgatccacaaggggggcgaacgtattacttcagtgatcccaatacgggttttactgaggctgtttcggcggaactgtttgaaggtgtactgaagaagatatataccgatcccgtcctgaaacagtttgtgcaaccgttgaaggcgtttccgggtgaacagaaataccttatcagcgtattcaatccagatcttattcccgagatatccggcgcatccaacgacatcaagttcatgtacaaccgtcctctgaatgggctggacactgtcacagtgctcaatacttcacggctgccgacggttgaggattcccgcctcaaggcgtattcccccgaacacaccgccatcaaagattatgagcgggtggtgcaagggctggacaacatgcaggccagcagaggcatgccgcagtatcaccaggcaaagaccgttctggaggccgtcaatctattcatcagcagccaccctgcttccgcgctcgtaccggctatggagacactcaggaaacgtttgacaagtgcgatcaatgaggcaattgcgcctgttgagtatccctatgtcttcgagcgtatggagcaagatcgtgtggcgttggccgagggtaaagtcggcttgtcgaaacatttccaaagtgaagtcattcagggcaagactgttgatataaagagtaatggtgatggtgaccccgatagggcagtacgggtaagagatgctgtagacgacgctctgaagaagctcgcgcagagcgatcctgcagcggcgcaggcgatcgggggaaaagtcagggtgattattgccaaccctggcgatcaaccagaaacgcggctgcactttaatagtccgccgacgttgatcattggtgatgatttttttgcgtcaccccctgcaactgacgctacagtcgccgatcgaatcggccatcaagctcaggcggacggaagaaaggtccaagcgtccaggcaggctgcgctgattgtgggcaagctggggatgttgggctattacaaagctgactcccaagggttccttgaggtggttaacaacaaggagccctttcgcgacggaggcagtaaagtcagcgcacgcgctgccagaagcccaggtgatttcatggaggagaccttcaccgcacgtgtatacgatggaaaggtcggtagtgaaaccgatgctgcgctcaataggcttttcgctccagcagctaacgctccaccacccagcaccccgcagccaccgagcacgccgactctgccggtcaacacgggagcattaccgaccacagcgggagggacgattgacgaggctgaagtaaaacgcctgcaagcacttgatgaaacccgcgcgcccttgcaaataggggaagcgagcgtcagccgagtcgaactttataaaatgggcgtgcacgtcaagggtaagccagttgaaaacacagtgcccatggatgccaaggggcgtatcagtggcgacgtggaaatagacttcgaccgtcttgtggcttttttgaagtcgacatcgcctgaagttggggcgcgcgtgacatccatcgccagtgaaattgctgtcaagcgcagccctgtcacggcccccttggtgacccgcagcgacggcagtcccgtccctgaacacttccagaagcaactacgtgacacatcacgacaggctgctgagatacgtgacgtgcagagcagcggcaaaccgctgcccgcaaattttttctccccggcagaaacatcgggaaagccgggggcgactaaagccgccggcctcggcttccaggcgttcagcacattccaggggctgtgcagttccatagagagttttcaacgtggcgatacgacggcgggggccatcgcagcgggcgctgtagcgtctgactacgtcgggatgggtgtagaggctggcctcaacaaaatggcgcagtcggcagtcaaaaccgtgacgccgacgataatgggcttcaagtcctcgacgataggcaagatgattggaaaggttgcgggtggggccagcgccgctatcagtgttccttttgatatcaaaaatgccgtcgattcgttcaataaagcggctggcagtaccggtaaggaagcgcaggatcactatgtcaacggtgcattcgccgtcaccaatgcggtgacttcgataggtttgagcgccgcatttctggccggcgcgagtactgccgggccggtgggacttgcagtggcggcaatattgatgaccgcacaagcgatttactcggccgtgcgtactgtggaggacatcaatgaatacacgccgctgtccggttcgaaaaagttcgaagtcggactgaaaacattcctggggtttgagcctgggtttgatgtcatgaagccttatctggaagcgaaatatgccaaggattacgacacgcagaagaggacgtatcatcaggccttcctggacggcccgggcaaagaccatttcgaacgtgttgtatttggcgctggggatgtagtcgtcacgcaggtgccgggaaaggttgaactgacaggccagcactggtgggctccgatcacctatttgctgaacctgatcaaagtggatgggaaagtcccatccgttaacatcaggggtgggaatgatcgtatcaatgcgcctgccgactcctggaacggcatgtcagtcaagcctgtggagggtgcacaggggacaggaaaggccacgctctgggacctgggcgatggcgatgacgaggtggcgggagtattcagcaaacccaactacttcttgttggggggagggaaaaaactgatcagtgggggagcggctgatgattcggttatcttcagcgctgatgcacgtcagaccctgcagcaggcagagcaggtctgggatactcagaacaataaagggttcagtaaaaaagccactgagctctggggcggtgagggccgtaacacactggtattttccggcagcttgagcaccacttacaccgaaggcaaagacactaaaaccgccagctattcagggcatgtcattgacttcaagaccgggttgatttcagtcagtacgccagactcgaaaacagaaggtacttctcccattgcctattttcatgagttttcaaatgccgccacagttgaaaatggcgaaagttatatcgtgggtgatgaccagagcaatctgtttaccttgaacggcaagcatgatgtggttttgaccggcaagggctccaatgttgtcgtgatcaatggcggcgctaacattgtcggagagggcggccccaatacctacatcgtcaacaaaagcgataaggaggtcaccatcaaggacccgaacgacagtgtgatcaagttggactacagcgcggcacaggtgtcgggatggagggtttcagcctcgggggacttgactgtaaaccttaagggggatgagcctggaagcgaacgtcaactggtagtccagaatgctttctccagcgattcaacgagtgacaaggcacggcccgcatttatcaccaatgacggtgtgatgatggcaatcaacgcgccacgccagcctggttcaggcacacgtgttgtgcaggtcagcagtgtcaaagtcgaaggtcccatgccccaagcctgagtccccgcgcagtagcaacagcatggggtgactggcaccggatacagtgccagtcaatctcagcgtttttgcaggctgcgctccatacgctgcaagccttcctccagcatcgaccgtgggcagccgaagttcaggcgcacgaattgctggctgtcatcaccgaattcgatgccggcgctcaaaccgaccttggcctgttccaggaagaactgctgcgggtcatccaggcccagggcactgcaatccagccaggccaggtaggtgccttgcggcgcgtgcatgaccacaccgggcaggcgggtctgcacggcgttgagcaggtagtcgcggttggcttgcaggtactgcaccaaggcgtcgagccagtcggcgcattcgctgtaggcggcgcgggtggcttccaggcccagggggctgacgctgtcgaccatgccacaacgggcgtggttgaagcgctcacgaatctcggcgttctgcaccacggcaaagcaggtcttcaggccggcgacgttataggccttgctcgccgacatcagggtgatggtgcgctgggcgatctcggggctgaggctggcggtggggatgtggcggcgaccgtcgaagcacagctcggcgtggatttcgtcggagatgatcaacgcgccgtgttccaggcaggcattggccacggccagcagttcttcacgggggaagactttgcccatggggttgtgcgggttgctcaacaacagcgcgccggcgccggtgagcgcctggcgcatcgctggcagtggcgtgaggtattcgccgttgaccagctcgaacggcacttcgatgcgcggcaggttccaatgccctggtgccaggcggatcggccggtagttgggggtttgcagcaccaccggttgccccggttggacaaacgcatgcagcgccatattgaaacccggctccacgcccggcaaaaacagcagctcatccggctgcacgcgccaggcgtacttggcccacaggtcggcgatgattgcctcgcgcacatccggaccggcgacgctgtagcccagcacctgctgatcgaggcgtgcgtgcagggccttgagcacggcgggcggcgcggcgatgtccatgtcggcgatccacatcggcagaacgtcttgcgggtagcggttccacttggtgctgccggtgccgaggcgggagtgaatcgtgtcgaaatcaaagctcatggggggctcgtatcagggcgtcaggcgcagggatggcgctgattctagcgccataatttttataggccagagctgattgcgagcgacagttgccgatgcgcctgttccaacgcgcgattgaccgcttcttcaccgcgcaccatggccggcaggtacacgaaatccactgactcaatgcccacggtcgccaggatggcggtcatgtacggcgtgaggaagtccggctcatgccccttgcgggcgttaccggaactgaccagcacaaaggtgcgccggtcttccagcaagccgaccttggcgaattgctcattcaccgtgaagctgcgctggatgcgtaccacatggtcgatccaggccttgagtgccgccggcacggtgaaattgtgcaccggggtgcacaggatcagcaggtcgcaggcttccagttcaacgatcaattgttccgagagtgccgtggcactgccgctcaggccgccgggtgtggtgagtgcgttggcatattcacgggtcaacggcggcagcgcctggccgccgtagtcacgttcggtcaccgcggcgtccggcaccaggtcgcgcagcagggcacgggccagtttgaaggtctgcgcggctttgccgtgggggctgaaaccaaggagcagggcacgggtcattggctgaggtcctgggaaaagtgcatgcctttgggcagcaggccctggcggaaatagaagcgctgggccagggccatgtgcatgccggtgtccagtaccagccagcgatagccacgggcgcgggtttcttcacgcacgcggtcgagcagttgttcaccgaggcggcgccgctgcaacgtggcgtctactaccaggtcatcgacatagataaagcggccatacagggtgttctcggtcagccggtagccggccaggccgatcacctggccgttctcccgtgcggcaagcaggcggtagccgttttgccgttggcgctggacttgctcggcgaatgccgtggcgtcgctgaggtgcgggcgcagctgctgcatcaccgcaaagctggcgatgagatcagtcgcggtttccacgtgggcgaattcgacgtgttcattcatggctgtggttctccaagtgggccttgatcgccgccggtactttgcgaaagctgatggcgacacggttaagggcgttcatcaagctgatggccagggtcaggtcggcgacttccttgtcgctgaacactgccgcgacctgtgcgtagtccgcatccggcacctgggtttgcgcgaccggcgtgaccacctcggcccaggccagcgcggcctgttcacgcggggtgtacagcggcagcccctcgcgccaggcggccagcaacatgattttttccaggctcacgcccagcttgagcaggtcgcgggagtggctgtccaggcaataggcgcagccgttgagttgcgagacccgcaggtaaaccaggtcgatcagttctttttccaggccgcagccgtggatatagctgtgcaccgagcccagggctttataaccggcgggggcggccagggcgtagtcgagacggtgtttcatgggcgatccttattgcggtgaagagatgcgccattttcgtggctggccgggtggcctgacaggggcatgattggacaagtgggttgggacatgatcagacttcggcctgtcttcccgccgagccacttgcgatgtcgtcactgcccaaataccaggaaatctaccggcgttttcgccaggccatcgaccagggccagttgcgccccggcgaacgcgtgccctcggtgcgggcgctggcccaggaactcaaggtggcgcggggcaccgtggaggcggcgtatcaactgttggtcagcgaagggttcttcgaagcgcgtgggcaagcggggacggtgattgccgaggcgttgccgcaggtgtcggtgaaacccatgccggttgcgctgccggcgacttcaggccttcggccgttgcaaatgggcctgcccgccctggatgcgttcccccgcaaattgtgggcacgcctggtcacccagcaagtgcgccgcaccgatgcggacagcctggcgatgggcgatgtgcgcggcacccaggcactgcgcgtggcgattgccaactacctggcgttgtatcgcggtgtggaatgcacgccgcagcaggtgtttgtgtgtgccgggtatgcgggcggcctcaccctggtctgcgaagcgctatcgatggcggggcagcgctgctggtttgaagaccccgggtacttgcatgcgcggcagttgttgaggcatcgcggtgtggaactggtgccggtgacggtggatcgcgatgggctggatgtggcgcagggcattgcacgggggcgtggggcgcgactggcgattgtcaccccggcgcaccagagccccttgggtgtggcgctgagcccggcgcggcggcaggccttgctggaatgggcgcgggagcagggcagttgggtggtggaggatgactatgacagtgaattccgctatcgcggccagccgttggcggcgctcaagagtcaggatgcggatgaccgggtgatctatgccgcaagcttcagcaagatgctgtttccggggttgcggttggggtatctggtggtgcccgtgtcactggtgtcgacctttgggcgtgcggccgaggcgttgcagcagcgtggggcgcagttgttgcaattgacggcggcggattttctggagcaggggcatttcacccggcatttgaagaagatgcgccagttgtatacgcagcgcagggggtatctggtggaggcgctgcgcgtgcattgcgcggggtatctgcgggtggatgagcaggcgggggggatcaatttgctggcgcggttggtggtggatgtgccggaccttgtcgtggctgaggctgccggtggggcggggttggcggttcaggcgttgtcttcctggacgcttgaggctgggcgggggcagggggtgttgatgggctttaccaatgtggcttcggcgtctgacgcggttgtggttgccatggttttgcgtgatgtgattggggggtgtgtatccgttatttagttcacggctactatttggttccgcccttacggccagctctttcaaggtctttaggtagaacaggcgataagtaccctgtggtgagcgggcttgtcccgcgttgggctgcgaagcagccctgaaactcgcgtctgaagagtgcctgactcaccgcattgcttcttccagggtcgcttcgcaacccaacgcggggcaaacccctctcgccacaggagcagtgttcgtctttgcgctggccggtcagtgcttgaccggggtcggcagggtcacgaggttgacgtagccatcccagaattgcttctggtccacgccgaacaccaccttggccttttgcgtgcccaccggggcacctttggcgtagcccagtgcgcggccgtagtcggcgccgaaggtggcgtccacatccacccacaggtcgcgggattcggtgacgattgcggggttgaccaggtacagcgccggcaggctgtcccaggtgaagctgtggtagctcgggtccttgtcgaacagcgggccgaactcatgcttgtacaggtcggcaatcgcgcctttgcgagcgatcacgcgctggtacaccgccttgtcgaaggtgactttctcgcacacatcgttggggaaaatcacgtgctcgatgggcgagcgcaacacgatctttgccgcctccgggtcgaaccaccagttgaactccgctgccggcgtggtgttgcccggaatctccagggcaccgcccatgtacacgatgcgcttgatcagcggcacgatgtccggtgccgagcgaatcgccagggcgacgttggtcagcgggccgacggcgaggatcgtcacctggtgcgggttggcgcgcacgctgtcgacgatgaactgcgcggcggtttccttgcgcagttgggtgtgggtggccaggccatccggtggtgcgaccaactgcgaaggagacgtcgggcgagggtgcttgaacgcccccggccagccggtaccgaacagcgtcttttccgcctcgtaggtggcgtagtcatgcagcaacgggtaggcggcgccggagtagacgcccacctctttctccacgcccatgcgttctacggccttgagggcgtcgacctgttcctggtcgacccaggcgttgccgctgaccagggtcatgcccagcagctcgatgcgtttctgcgcatgcagctgggcgagcatgatgaaggcctggccgtcatcgttgagcacattgaagtcggtgtcgaagatgactttttccgccgcctgggcggtgccggcacacaggccgaccgcgacaagcaacgcacagcgtttcaagaagccttgcatggtgattcatccgaaaaaatgtggttatcagcggttgaccagtttcgccggcaaggcgatgaccaggaagctgctgagaatcaggcaaccggcgaaaaaccacaaggcaccggcgctgctgcctgtgacgtcgatcgcaacgcccatcagcgagttgctcaccaggccggcaatattcgccaccgaacaggccagggcaaagccggtggccgccgcggtgcctttgaggaaggtcgccggcaggctgaaaaataccggcaccgcgccgatgatcgccgccgaggcaatcgcgaacagcgccacggtggccgccacgctgtgggtgaagaaggtgctggtggccatcgccgccgcgccgatgaaaaacggcacgatgatgtgccagcggcgctcgcggtgtttgtcggagctggcgccgatcaacagcatgccgagcagggcggcgacgctcggcaaggctgtgagcacgccgatatgaaaggtgtcggtgaccccggcgttgcggatgaaggtcggcatccagaaacccatggcgtaggcgctgagcaggatcgagaagtcgataccgccgagcatccacaccttgaggttgaagaacccgtcgcggaagctgtgcttgctggcggcgccatcggcgtcgtccttgcgcagctcggtttccagcagggtcttttcctcgtccgacagccatttggcttgctggtaggtgttgggcagcgcccagaaagtcagcacgccaagtaacacgctgggcaccgcttcgatcaggaacagccactgccagccgcgcaggccgcccatatggtcgaagtggcccatgatccagccggacagcgggccgccgatcacgctggacagcggcaggccgatcatgaacaacgcaatgatgcgcccgcgccggtgggtggggaaccaggtggtcaggtagtacagcacgcccggcagaaagcccgcttcggccgcgccgagcagaaagcgcaggatgtagaactgggtggtggaggtgaccagcatggtgcaggccgagagcaggccccaggtgatcatgatgcgcgcgatccagatcttcgcgccgacccgttcctgcaccaggttgctcggtacttcaaagaggatgtagccgacaaagaacaggccggcaccgaggccgaacgcggtttcgctgaactgcaactggtcgagcatttgcagcttggcgaaaccgatattgatccggtccaggtaggcggccagataacagaagcacaggaacggtatcagcttccaggtgatcttgtggtaaagcgtgttgacgggatcggcgaccgtggtcgccggcgctgcattcgcaatgggcatcgggtgtctcctggcggtgacttatggtttttttatacagccggcagttggtgtagggtcgcggaccgcgctcttatggcgcttttatggctaaaaccttattgctccctgaatttgcgcatcgcctcctgcttgctcaccacgtcgccatacttgctgtcgatatcgaacaggttggcttcatggggggccgggtgtcggtcgccgacgcattcgcgcacgacgatggtgcgaaacccgtgttgcacggcatccaccgccgtggcgcggatgcagccgctggtggaacagccagccagtaccacggtgtcgatgccttgtgcatgcagcatcggcgccaggctgctgccaaaaaacgcactggcgtactgcttggtgatcaccacttcatcggcctggggcagcacctcggcgcagaacgcggccagtgggttgccttcgaccatgtctttcatcaccggggccttcttgacccagattccgccatcgacgaaatggccgggatggtagcggatattggtgtgcaccaccgcaatcccgtgctggcgcgcgctggccagcagctccacgctttcagccacggccgtgaccacacccggtgcgaacagcggcgcgccgtcggtggtgtagccctgcatgaagtcgatcatcagcagcgcggcctttttgccaaagccgatgcggttgccccatacgccctggtagttggcgtcggcggattgttcgctcatcttctcaactcctcattcatgtttgctgtggcgagcgggcttgttgtggtgagcgggcttgccccgcgttggagtgcgtagcgctcccgctttttttggggccgctgcgcagcccaacgcggggcaagcccgctcaccacagaagcccgctcgccaccaccacagaagtgctttgcactccaattagtaggcaccggagagcagggcacccgcgccaggcacgatgggctccaggtccagggccttgagcatggcgtaggtggtagcgatagcggcggtgagcactggcttgccggtttgtgcctcgaccttggccaccaccggcagcgactgcatctgcacgcaggcggacagcacgatcacgtcgacgccttccaggttcatgccggcgacgatggccggcaggttggccgggtcgtggcgcgccacttcgaggttgtcggggatctccagggcgcgccagtccaccacgtcaaaaccttcttcgcggatgtagttcaccaccagttcggtcagcggcttcatgtacggcgcgacgatggcgatgcgcttggcgcccatgactttcaggccttcgatcaaggcgccggcgctggtgatgaccggggcgttggcatcgttgtcggcggtggccttgcgcaggcgttgttcggagttgcggtgatatccgagccccatggccatgatcgccaccaggcacgcataacccagcacgtctaccttggcgtcggacagttcgacggcgcaacggtcggactcaccgtccatggccgccagttcttccttgcgcacctgcttcatgcgcatgcggctggagtgaaaggtaaaacgctcgggacggatcgcctggcgcgcggtgagcatcgccgggatctcggtttccatggtggtgttggagctcggcacgatctggccgatgcggtaaggcttctgcatggtggtctccgtttttattgtgtgaggaagtcgccgagggcgtggaagaaaccgtcgaagtcatcccacggaatcatgtgcccggcgttgggtacgcaggcgacctggatgtgcggctgcaggtcctggatttcggcaacgtcctcatcgaggatcaccccgccgcgaccggccaccatcaacagggccggggccttgaggtgaggcagatcctggtggaagtccacgctgtggaaatcattgaaggcgcgcacgatggcgggctcatagcaggtgtgcagccattcggcacgcagttgcagttgttcgtcggtccaggtggcgcagaaggcacgcatcgcctcggcgtccatgccgaccagagattggcggatcgaatcgacgtaccacggcagtttgctcgggtactcacgccgacccgggccagacaccggcgggtcgatcagcaccacgcgcttcacgccctgcggatgtttgaccgcactgcgtacggcaaaacgggcgcccatggaatggcccatcaggtggtagctgtccaggttcagcgcatcggcaaaggcaccgatgtcgtcggcgcaggtatccgcgctgtagtccagttcggggccggtggaggacagcccgcgaccgcgcacgtccagcacataggtgtcgaactgctcgcccaggcgctccgcgacgaaaccccaggtgatcgcaggactggtgatgcccgggatcaggatcagcgccgagcctttgccgccgtagcgcaagtaatgctggcgaatgccgttggcctgcacgttgccgccgtagaggaaggtgctcacgcggccacccccgatttcagtgcctgggcgtacaggtcatagccgtagacccaggccggatcttcctgggtgcgcagccaggtgttggcgttggacactgcttgcacccgcgaggcgcgttccttgcggttggcttcgtacagctcgaaggcggtgcggtagtcgctgatgccggtttcctgcaggcagcgggtgagcatggcggcgtcttcgatggccatgccggcgccctgggccatgtgcggcttcattgggtggcaggcgtcgccgagcagtaccaggcgaccccggctccacagcggtagcgggttgcggttgcgcagcggccatttggtcacgctgtcggtggattcgatcaaggcttgcacggtggggtggtagcccttgaaggcgtcgaacatctcttcccggctgctgtcgacgaatgcgccctggaagtcccattcggggtggggtacgccggtcacgtagtagtactcgtcgcgcttgccggtggtgtagtagaccatcatgtggcggtcctcggtccaccacttgatgcagtcttcgaacttgtggttgtacttggcgagctggtcgccacggatcagtgcgcggtgcgcgacccagccgctgtagagcggtttttccacgcccagcagttcttcgcggatcttggaattgatgccgtcggcaccgatcacgatgtcggcgtaggtcacttggccgtcggcgaaggtcaggcgcacctgggtgtcggtttcttcgaggctttccaggcgtttgttgaagtgcagggtgccgggcttgagggtggacatctgcagcgcatgcaggtcgccacggtgcacggtgatgtaggacgcgccgtagccggtgagcggaatgcgcgagaggtagtcgccggtttcaccgcagcggctgaaccagtgctcggggtgcgaacccatctggtccagctgcttttcgatgcccatgcggcggaagattttcatgatgttggggcccatgtggatccccgcgcccaaccgggaaaactccggcgcctgctcatacacatcgacgtcgaagccggcttgctgcaacagggtggcagcggcggcaccgccgagaccggcaccgacgatggcgattttttgagtgcttcccatggggcgtgttcctctctcttggtgattctttgtgatgttcggcggcaactgtctgcaaggtttttaaagtgtatacgctcattttttgaaatgggaagcctgtcttggcaaatttattttttggccatatttatcctgtgtaacgctatgtatctagcaaatgctgggcgtgtatcgataggtaacgttatagtgcgccgcttgcagtctgttcgcaattcggttcttatcgttattaaatggcgtatacgctataaaaatgcactagagtgaagcgcagtgcatgaacttggtgcagacccacaggagacaggaaaatgccggtaagcgattgcgaattgacccagatgttcgagcacgtgttgaagctgtccaaggtcgacccgacccagagcgtcgccgtgctcaagagccattactccgacccgcgcaccgtgcgtgccgccatggatgctgcgcagcgcctgggggccaaggtgtatgcggtggagttgccttcgttcaaccatcccaaggcgatgggcaacgacatgaccgcctactgcggcgacaccgcgctcactggcaatatcgccgcgcagcgcgcccttgaagcggcggaccttatcgtcgacaccatgatgctgctgcactcgccggagcaggagcagatcctcaagaccggcacgcgcatcctgctggccgtggagccgccggaagtgctggcgcgcatgctgcccaccgaggaagacaaggtgcgggtgctggcagccgagcagttgttgaagaaggcgcgttcgatccacgtcaagtcccgcgccggcagtgatttccgtgccgccctggggcaatacccctctgtgaccgagtacggctttgccgatgaaccggggcgctgggaccactggcccagcggcttcctgttctcctggcccaacgaagaaaccgccgagggcgtgctggtgctggacatcggcgacatcctgctgcccttcaagacctacacccgcgagaagatcaccctggaaatcgaaaagggcttcatcactaaaatccatggggggttcgaggccgaatacctgcgtgactacatgaagtacttcaacgaccccgaggtgtacggcatctcccatatcggctggggcctgcagccacgggcgcagtggacggccatgggcctgcacgacaagaacgacggcatgtgcatggatgcgcgggcgttctacggtaatttcctgttctccaccggaccgaacaccgaggtgggcgggacacgcaagacgccgtgccatatggatattccgctgcgtaattgcgacgtgtacctggatgatgaggcggttgtgattgcgggggatgtggttgccccagcaggctccctggcccgctgattaacccatgtgggagggggcttgcccccgatggcggnnnnnnnnnnnnnnnnnnnnnnnnnnnnnnnccgccatcgggggcaagccccctcccacatgtagactacattcgagcatgagaaacttgagtgcatccaacaacgaagccatcatgcttccccatcgccagccatccaccgagccccgccgtgcctgattcttacgtcttttctgaacaagttggccacctgctgcgcaaggcctaccagcgccacctggcgatcttccagcagaatgtcggcgactcccagctcaccgccgtgcagttcgtgacgctgtgtgcactgcgcgatcacggtgcaagttcgctgaccgagttggtcaaggcgaccgcagtagaccaggcgaccattcgcgggatcgtcgagcgactcaaggccaaggcactgatcagcctggaaccggacccgcaggacaaacgcaaggtggtggtggacctgtccccggcaggtgccgaactggttgcccagaccgcgccccgtgccgcgcagatcagtgaattgaccatgagcaatctcaacccggccgaacgggtggcggtactgttcctgttgcgcaagatgatcgacgatccccaggaatagtcactgctggcaccgatcttgctctaagttcgtgtagtaaccacttcaccagtcaagtgtgtcgcgaggccccaggtccgtgatgcttttttttgactgtttcatgtagtgattacttcaccaactgttacgggcgaagcacatgatcagccagcacatcacagtagcgcttgaggtcaacgggcaaacacgcgaagtcagcgctatggcggacacaccgctgttgctggtgctgcgcaatgacctggaactcaatggtcccaaatatggctgtggcctaggggagtgcggtgcctgcaccgtgatcatcgatggggtggcggcgcgcgcctgtgtgtttccgttgtcgggggccgtgggacgcgagattgtcaccctcgaaggtctgggcacgcgccaggcgccgcacccggtgcaacaagcctttatcgatgagcaggccgcgcaatgtggctactgcctcaacggcatgatcatgaccgccaaggccttgcttgaccgtaaccccaaccccagcgaagcccaggtgcgcaacgagctgtcgggcaacctctgccgctgcggcacccatatcgaaatcctgcgcgccgtgctgcgtgcggcccgcctgctgaccgtggattgatgaccatgccgaacattccgctttcccgtgaccaatggctggccaaggccggcgtcctgttgatcgtcgatgaggtgctgccgccttcggggccggtggccaagggtggcacgcctacggtcaagcccaaggagcttggactgtttattgcggtcaacgatgacggcctggtgtatgcgttcaacggccatgtggacctgggcaccggcatccgtacgtcgctggcgcagatcgtggccgaggaactggacctggcgatggaccaggtgcagatggtgcttggggataccgagcgcgtgcctaaccagggcgcgaccattgccagcgctaccttgcagatatcagcggtccccctgcgcaacgcggctgccgaagcccggcgttttctgttggcgcgggcagcgggacgctggggtgtgagtaccgccagcctgaaagtggaggctggcgttattcaagcgccagatgggcgcaccaccacctatagcgaaatggtcagcggccagcacgaccagctgcgcatcagcggtgacgcgccgttaaaggccattgaggactatcgcctggtgggcaagggcgccgcacgggtggatatccccggcaaggccactggcgaactgacctacgtgcacgacatgcgcgtaccgggcatgctccatggacgggtgatccgcccaccgtatgcggggctcgattgcggcgattttgtcggcaacagcctgttgagcgtggatgagtcctccatcgcccatattcccggcattgttgcggtggtggtcatccgcgattttgtcggcgtggtcgcgttgcgtgaagagcaggcgatcaaggccgccagcaccttgcaggtgcactggaagccctggaaccacgccttgccggacatgcgcgatgtcgagcaggccatccgcgacaaccctcgcgtacgccgcaccgtgcttgaccagggccatgtcgatgaagccctggcgggggccagccagcgcatgccgcgcagttacctgtggccgtaccagatgcatggctcgatcggcccctcctgtggcgtggcggattactcgccggccggcagccgggtgtggtcgggcagccagaacccgcacctgctgcgcgccgacctggcgtggctgctggagtgtgatgaggcgctgatcgatgtgatccgtatggaagccgccggctgttatggacgcaattgtgcagatgatgtgtgtgccgatgccttgctgctgtcccgtgcagtcggcaaaccggtgcgcgtgcaattgacccgtgaacaggaacacctgtgggagcccaagggcactgcgcagttgatggatgtggatggcggcctcaacgccgatggcagcattgccgcctacgactttgaaaccagttacccctccaacggcgcgccaaccctggcgttgttgctgaccggccgcgtggaaccggtggcggcgatgttcgagatgggcgaccgcacctcgatcccgccctacgacatcgacaacatgcgcgtgggcatcaacgacatggcgcccatcgtgcgtgcgtcgtggatgcgcggtgtgtcggcgctgcccaacaccttcgcccacgaatcctatatcgatgaattggccttcgccgccggtgtcgacccggtggaataccgcctgcgctacctcaaggacgagcgtgccatcgacctggtcaaatccaccgccgagcgcgccaactggacgccgcgcaccgcgccgatgcaaaccgccaacgacgatcacctgctgcgtggccggggctttgcctacgcgcgctacatccacagcaagtttcctggtttcggcgcggcctgggcggcatgggtcgcggacgtagccatcgacaagcagaccggtgatgtgtcggtgacacgcgtggtgatcggccatgactcggggatgatgatcaacccggctggggtgcagcaccagatccacggcaatgtgatccagtccaccagccgtgtgctgaaggagcgcgtgacctttgaggagtcgacggtggcgagcaaggagtggggcggctatccgatcctgaccttccctgaggtaccgcagatcgacgtgatgatgatgccgcgccaggaccagccgccgatgggcgccggtgagtcggcctcggtgcccagcgcggcggcgattgccaatgcgatctacgacgccaccggcattcggtttcgtgagctgccgatcaccccggagcgggtattggcggcgctgaatgccggcaccttgggcgagccggccaagtcgccggagaaacggcgcaaatggtggttcggcgcgttgttcgccaccttgggcgcggtgttggcgacggcctggcccttccacaatgaaatcgccccgattgcgccgcccagcgccggcacctggtccaaggccaccctggaacgcgggcgcttgctcgcggcagtcggtgattgcgcggtgtgccatacggcgccgggcggtgcgaccaatgccggtgggctggcgatggaaacccccttcggcacgctgtacagcagcaacatcaccccggacgtgaagaccggcatcggtgcctggtcgtacccggcgttcgagcgcgcgatgcgcgatgggattggccgcgacgggcgcaacctgtacccggcgtttccctacacggcgtttcgcaatatcaacgatgcagacatgcaagcgctgtatgcctacctgatgtcccaggcgccggtgagccaggcgccgacgccgaatgccatgcgctttccgttcaatatcaggccgttgatggcggggtggaacgcgttgaacctgcgacgcggagaaatcaccccgcagcctgagcgcggcgagcaatggaatcgcggcaattacctggtcaatggcctggggcattgcgcggcctgtcattcccctcgcaatgtgatgggagcggagaagggcggcaaggcgttcctggccgggggcatggtcgatggctgggaagcgccggcactgaccggcctgtccaaggcgccgacgccatggaccgaagatcagttgttcacctacttgagtaccggctattccgatgcccatggcgtggccgcaggcccgatggggccggtggtgagtgagttgtcgaaactgcccaaggcggatattcgcgccatggcggtgtacctggcatcgctcaatggcgaagccgcagccgaggcccaggtggcggcggcggtcagcgtgccgaatcccaatggccgacgcgtatttgaaggttcatgcaaggcctgccatgccgatgggctgggaccgaagctgtttggggtgagcccgtcgctggcgaccaataccaatgtgcacagcgaccagccggataacctgatcaaggtgattctgcaaggcatcagccacccggcgaccaaggacctggggtatatgccggggttcaaggacagtttgtcgaacagccaagtggtggatctggcggcgtatctgcgcgggcaatttgcgccgaatacgccgcagtggaaggggttggagcagaaggtggcgcatctgcgtgccaaccccggcacccattgacgcaatggggtaaaacaggtgggagggggcttgcccccgatggcggtgggtcagctagacataggctggctgatgtacctgtatcgggggcaagccccctcccacattttgattgggtgtttacagggagggcggggtgacgccacgtatcactaaatcactgataaaactcagccaatcctgctgctgccctttgttcgccaggtcttcaccgaggaatgagctgagggtatgccggttggagttatagaagtagcacagcgaggcgatcatcaagtacacgtgcttgaggtcgacatcctggcgaaacaccccctgggcctggccggcttcgatgatcggctttaatacgcccacggcttcaccggacaacctgcgcatctcgccggattgctgggcatgcttgccttggtgcaggttctcgatgctcaggatcgccacgaattccgggtgcttgacgtagtaattccagataaacgccaccaggtcgcgcagggcctgctccggtgcgtccaggtccagcttgagcttgctttcggctttgttgaactgctcatagatgtgttccagcacgcagacgaacaggtgttccttgctgccgaaatagtaataaagcatgcggtcgttggagtcggcttccttggaaatggtgtcgacacgcccgccggaataaccgtcacgggtgaacaccttgaccgccgcctggaggatgcgcgcgcgggtctggtcggcctgttgggcgcggatgccggtcttcttgatcatcaccatgtcagagcgccttgcgggacagtcagggcgcgaaatatagcatgggcgttttcaggtccgttctgtgaccgacaagttctgtaataaaaacgccattgcgctggggattaaatccgcaacgggctattttggtgcgtcccaataactagagtagccatggatgaaataccaacctttcagccgtaccttgattgccacagccctggtgttgaccgtcagtggtgtgcaagccgcttcccaggccccggtggccggtgaaaatggcatggtggtgacggcccagcatttggcaactcatgtgggtgtagatgtgctcaaggccggcggtaatgcggtcgacgctgccgtggccgtgggctatgcgctggcggtggtgtacccggcggcgggcaacctgggcggcggcggtttcatgaccgtgcaactggcggacgggcgcaagaccttcctcgacttccgcgaaaaagccccgttggcggccaccgccgacatgtacctggacaaggacggcaaggtcatcgacggcctcagcgccaagggccacctggctgtcggcgtgcccggcaccgtgtcgggcatggagctggcgctgagcaagtacggcaccctcaagcgcgcccaggtcatcgccccggcgatcaagctggcggaaaacggctttgcgctggagcagggcgacattgacctgctgcacaccgctaccggcgagtttgaaaaagacaaggacatgcgcgggattttcctgcataacggccagccgatgcaggtcggccagaagttggtgcagaaggacctggccaagaccctcaaggaaatctcggccaagggcagcgacggtttctataaaggctgggtggccaaggcgctggtggattccagccaggccggcaagggcatcatcacccaggctgacctcgacaagtacaagactcgcgaactggcgcccatcgagtgcgactaccgtggctatcacgtggtctcggcaccgcctcccagctcgggtggcgtagtgatctgccagatcatgaacatcctcgaaggctacccgatggctgatctgggctatcactcggcccaaggcctgcactaccagatcgaagccatgcgccacgcctacgtggaccgcaacagctacctcggcgacccggacttcgtgaagaacccgatcgagcacctgctggacaaaaactacgcggccaaactgcgcgacgccatcgaaccgcagaaggccggtgactcccaggcgatcaagccaggcgtgtcaccccatgaaggcaacaacaccactcactattccatcgtcgacaagtggggcaacgctgtgtcggttacctacaccctcaacgactggttcggtgcgggcgtgatggcgagcaagaccggggtgatcctaaacgatgaaatggacgacttcaccgtcaaggtcggcgtgccgaacatgtacggcctggtccagggtgaagccaacgccatcgcaccgggcaaggcgccgctgtcgtcgatgagcccgaccatcgtgaccaaggacggcaaggcggtgatggtggtgggtacgccaggtggcagccgcatcattaccgcgaccttgctgaccatcctgaacgtcatcgactacaagatgaatatccaggaagccgtggacgcgccgcgtttccaccagcaatggatgccggaaaccaccaacctcgagcggtttgccgtgagcccggacacccagaagatcctcgaaagctggggccacaagtttgccggtccgcaggatgccaaccacttggcggcgatcctggtgggcgcaccgtcgctggatggcaaaccggtgggtaacaaccgcttctatggggcgaatgacccgcgtcgcaatacggggctgtcgctgggctactgaggcgtgaggtggtgatgcaggtgggccagggacagcgccaggctgtcgtgggataactggatggcggcgccttcggcgctgccctgggccgccggtatcacccgttcgaacatgtggttttcataggcctgcactgcggatgagcagtcgggtgtctccagcaggtgctgcgccagttcagccgcatccagcatcgccgcgttcaccccttcgccgccaaacggcgacatcagatgggccgcatcgccgatcagtgtcaacccctggcggtgggaccagcgatggccgacgggcagggcgtagatcggtctcgccagtaccgtctcgttcgccgcatcaaacaatgccaatacctgcgggtgccagccatggaactgggctttcagtgcgggcaggctgaggtgatcggctgcccagtcggacggtacacggaagatcgcatagccgcgcaaatgcgcgttggcgttgcgctgcacgatgatcgccttggcttctccggtaacctgcagggtgcctcggccaaccagtccggcgagatgcgggtgctgacagtctgcatcgtcgatgccgaattcgataaaggtcaatccgctatattgcggctgataggtcgacagcagcgggcgtattttcgaccaggcgccgtcggcacccaccaccaggtcgaagggcccgtgggtgagcgcgccctgatgaagtgcccagcgtccatcgccggtcggacgcacgtcggtgacgctgacaccccagctcacacagtcttgcggcagtgaatccagcagcgcctggcgcaaggcggtgcggtcgacttcagggcggtcgcctgcgctcgggttgggggcttcgaacagcaagcgcccatgctgatccatcaagcgcgagccttggtcttcgtaacgggcgatgcgtttgaacgcgtcctccaggccggcacgctgcaaggcgagttggccggattcggcatgcaggtcaagcgtgccaccttgtgggcgctccagcgggctacgttcacgttcaaacacgctggcgttgacgccatggcggtaaaggattcgcgccaaggtcaacccgccggggccggcgccgacgatggcgatgcgcaacgaggtatgcatgaagttgtccttggcgatgtttacaggatcctatacatttagttcataggatcctatggaaagtcaacgccctcatgaagattcaaacgcctgctccaaaccccatgcaacagatcggcatggcgaaccgggggttcatccgcctctacgaaggtcgcctgagagcgctgggctttgctgtcgcgcagattccggtgctggtggcgctcaagcgcagcggggggttgccgcaggccgaactggtgcgcatcgcccgtgtcgagcaatcgagcatggcccagttgctgggtcgtatggagcgtgacggcatgatcgaacgggtggctgacccggctgacaaacgcagccgcttgattaccctgaccgacgcggcgcgcgaacgcatgcccgccgcccgcgcgatcatgctgcaaggcagcgcgcaggcgctggaggggttcagtgaagaggaggaggcgaccttgctggcgttgctgctaagggtgaatgccaacctggagcgtgccggagagtagctgttcaaccactgcaaatgcgctggcgcggcgctgtgcccaatgaccacgaatcaccagggcgggctgctgatggtgctcgatccactccaggccgcctcggaagaacgcttggcggtcggccagctccggctggcagcgctggccgtcggcggtccattccacatcgtccggcgagagcagcaggtgcaggtcgtagtggcgggccagcagttcgctgtcgagccaggtggggtagtcgccgaacagggtctggctccagagcttgttggtcagcaggtgggtgtcgaggatcagcagttcgggctgccgggcgcgggcggcgtcttcccaggccagttggcctcgggcaatggccgggatgtcggccagggtggtgtcgcgctgatggtgatcgatgaaatggcgtacgtattcaccgaccatcaacccgccgaaatgcgcttgcaactctgccgccagccagcttttaccgctggattccgggccggccagtaccaccaccttcatgggtgcaacgccgggtcggcgcgccattcacgccagccttgcacggcgatcacggtgaacagcgcgtagagcgctgcggtgaggtacaggcctttgtagaggaacagcccgacgaagatcacatccaccgcgatccacagtggccagcactgcacacgtttctgcgccatccacatttgcgccaccaggctgaagccggtgagggcggcgtcgagccagggctgggcggcatcggtccagtgggccatggccgcaccgagcagcaggctgcccaccgcacccacggccaggctggcgatgatcgccggcacgcccaggctggtgacctggcgcccttgcttgacctcgccggcgcgggtccactgccaccacccgtagacctgcagcgcggcgtagaccacctgcaagagcatgtcggaatagagctttacgtcgaagaacacccaggtgtacagcaacaccatcaccagcccgatcggccagcaccaggggttttgcttgaccgtcagccataccgcgatcaccccgagggcagcggcgaacagttcaagcccggacatggtggttccttgggagagtgggagagggcggggattgtaaccaaagaagaatgctgcgggcattatctctgtagtgagcgggcttgccccgcgttgggctgcgtagcagccccataaatacggcgcgtactgcctgacagtaagcggtgtctggttttagggctgctgcgcagcccaacgcggggcaagcccgctcgccacaacaagcccgctcgccacaagcagcatcagattttgaattggcgcagcaggccgtcgagctgttcactcaggccacgcaactgtccactcgccacgctcgattgctccgccgccagcgcggtgctgtgggacaagcccgccgcctgggtgacgttctggttgatgtcttccaccacatgagcctgttgcagcgtcgcgctggcaatcgaggcgttgaggccgttgaggttgcgcagcgcctggccgatggcggtcaggctggccccggcctggccggcttgttcgatggtcagttgcgaggcgctgtggctgtcgctgatcaccttgaccgcggcttccgaatggccttgcaggcgttcgatcatgccctggatctcggcggtggacttttgtgtgcgctgggcgagcagccgcacttcgtcggccaccaccgcaaagccacgaccttgttcgccggcgcgggctgcctcgatcgcggcgttgagggccagcaggttggtctggtcggcaatcgagcggatcacttcgagcacgctgccgatctgggtgctttcggcggacagggtgcggatcacctccaccgcctggctgatggtgccggagagctggtcgatctgctgcaggctgccgtcgatattgacctggccttgctgcgcctgggcctgggcgtcgcgcatttcgctggcggcgtgttcggcgttcttggctacatcctgcacaccgtaggtgacttcgttgatggcggtggctaccagttccatctgctgggactgctgctggctgcgatcatgggcctgggtcgcattggtgcccagttcctgggacgactggcccagggcgttggcgcattcctgcaactggctgaccacctggcgcagcttggcggtgaagctgttgaagtgccgggccagttgggtgacttcgtcctggccgtgggtgtcgaggctgcgggtcaggtcgctttcgccgctggcgatgttgcccatggcgttcaccgcgtcctgcaacggccgcacgatgctgcgggcgatcagcgctaccagcaacgccatgagcaccgcgatacccaggccgataaacgaggctttccacacctggccgctgaactcggcctgcacatcgtccacgtacaccccggaaccgatgatccagccccacggctcgaacagttggatgtacgaggtcttggccaccggcgcttccgcacccggtttcggccagcgatagttgacgatgcccgcgcccttggccttggccaggctcacgaattcgttgaacaccgcaaaaccgtcggggtcgcggatggccgagaggttctggccgtcgagcttggggttggccggatgcatgatcatcacgggcgtgaggtcgttgatccagaaatagtcgtcgtggtcgtagcgcaagccgcgcacggcactcagggcttgtttctgggccgcttcgcgggtcatcacgccggtggtttcgaggccgtgataaaacgtcaggatcccgctggcggtctggaccacatgttgggtctgttggcgcttggcctggtaaaggtcgccgtggatctgcttgagcatcagcaaacccagggccagcagcatcagcacggcgactatcaggatcagccagagacgccggctgatcgacatattgcgcaaactgttcatcgtcctgtcactccgtgctttttataattgtgggcgccgcatcgacttttccgccttgtctgataggctttcggcctgtattcggaaaacctgaatactgtctgatttttcacaagatttttgcgtgccggggttgagaatcagccccgggtcttgtcgtcagtgaaccattaaaaagatcagcaaggcttgccatagagcaagacctttgggggaagcatggatttttggaccgccatacaggcattgattcttggcgtcgtggaggggctgaccgagttcctgccgatttccagcaccggccaccagatcatcgtcgccgacttgatcggcttcggcggcgagcgtttcgaggccttcaacatcatcatccagctgggggcgatcctcgccgtggtctgggagtttcgccgcaagattctcgacgtggtcatcggtttgccgagccagcgcaatgcccagcgctttacggtcaacctgatcattgccgtgttgccggcagtggtattgggggtgatcttcgccgacctgatcaagcactacctgttcaacccgatcaccgtggcgaccgccctggtggtgggcggcatcatcatgttgtgggccgagcggcgccagcaccggacccatgccgagagcgtcgacgagatcacctggaaagatgcgatcaagatcggcttcgcccagtgcctggccatgatccccggcacttcgcgctccggtgcgaccatcattggcggcctgctgttcggcctgtcgcgcaagaccgcgaccgagttttcgttcttcctggccatgccgaccatggtcggtgccgcgctgtactcgggctacaagtaccgtgacctgttccagccggcggatttcccggtgttcgccatcggcttcgtgacctcgttcatcttcgcgatgattgcggtcaaggggttgctcaagttcatcgccagccacagctacgcggcatttgcctggtaccgcatcgggttcggcctgctgatcctggcgacctggcagttcggctggatcgactggacggcggtcaagccttgagcatccagtatccgcgcttgaaggcggcgatctttatagtgttgtgcgcagcgccgttgataggggccgccctggtctggtatcgcggcgagacgctgatcccgctggcggcctatggcgtggtcagcgtgattgcgtttttcctgtactggagcgacaagcgcaaggcgcagagcgaccgctggcgcaccccggaaaacatcctgcacgccgtagagctggcgggcggctggccgggagcgttgattgcccagcaggtgttccgccacaagacgcgcaaggtgtcttaccaggtgctgttctgggtgatcgtgttgctgcatgaggtgttctggctggaccagttgttcctcggcggcactttgctctcagtcctctagcagcaacccgacctgcgtgcgcttgggcaacttgctcactaccaactggtgggagcgttgcaacaagccacgcagttcttcggcgcccagcgggtagggcgtgttcatgatgacccactgcgcacgcgccaggtacggcgccgggtggatgcccgggcgatccacatggccgaggaacagctccttgtcgaccttgaacgccagcgagtcaccgcgcaggttttgcagggcgaacatcttgttgccggcaatcgagaacacccgcactccaccccatttgtagtcttcgcgcgcgccgggcagtgccaggcagaacgccgcgacttgtgcttcggtcatcttcatagcaagcggtctccacagcctttgaagccttcctcaaggtagtcgatccaggcgcggatcgccggcagcacgccgcgccgatgcgggtagaccgcctgcagccaaccgcccggcaacgaccattcgggcagcagttgcaccaatcggccgttcgccaattcctcttcgcagtacatcatcggcagtacggtaaagcccaggcccatgatggcgctggctttacgcacgataaaatcgtcgatacccaggcgggcttccatcgccaggtcgtgggcgttgccctgggggtcgagaatgcgttgatgcaccaggcggtccgcctccagcgcgccgagaatcggcaactgcttgaggtcatccagggtcgcaacctgacgcccgagcatcagcgtggggctggccaccagcacggtctgggcctggcgcaggcgtttggtcaccaacagcgggtcttcatcgccgagttcgcgcacgcgcaaggccacgtcgatgccttcggccaccaggtcgacgcggcggttgaccagggtcatctccaactgcacctgagggtgggcggcaagaaaaccggcgaccagctccggcaggatgtgctgggccatgcccaccgggcagctcacccgcagtcgcccacggggctcgctggacatgctggccacggcctcatcggccatttccgcctccagcagcatggcctggcaatgacgcaggtagcgctcgccaacggcggtgagggtgagttgacgggtggtacgttgcagcaggcgtgcgccgaggcgctcttccagctcggcgatgcgccgcgacagccgcgacttgggaatccccagcagccggccggcggcggcgaaaccgccggcttcgacgactttggcgaaatagtagaggtcgttgaggtcttgcatgatcaacctattgtcctgtcaatgggacgaactatccgcgcctgacgagggcaaatccactacaaatgcgcaccgcccatcaacacatacttcacctgcacgtactcttcgatcccgtagtggctgccttcacggccataaccggactgcttgatcccgccaaacggcacggacgcggtgccgaccgaccctgagttgagaatcaccatgccagcctccaattggcgcgacaggcgcaacgaccgccccaatgcgctggtgtaggcataggcgaccaggccgaattccgtctggttggcgcgggcgatcacttctgcttcgtccttgaacgagtagatggcgaacaccggcccgaagatctcctcggtggccaggggggagtcgtcctgcaagccggtcaatatcgtcggctcgtagaacaggccgcccttggcgtggggtttgccgcccatcagcacgctggctccggcagccttcgcggcctccaccaggcgcacgaccttgtcgaaacccgcttgattgaccaacgggccgaccacaaagccttcacgcaggccctggtccacttcgatctcggccacggcgtgcttcacgcgtgtgatgaagtcgtcgaggatgctgtgctgcacaaagatccggttcggcgagatgcatacctggccggagttgcgcagcttggcaccgaccagtcccttcaccgcctcatccaggttggcgtcctggaacacgataaacggcgcgttgccgcccagctccagggtcatcttcttgatgctcgccgcgcattgtgcggcgagcaatttgccaacgccggtggagccggtaaacgagatcttgcggatacgcgggtcgcccgtgaggatcaggccgatcgccttgggatcgcccactaccacctccagcacgccttccgcgatcccggctttgcgggcgtattcgagcaatttgaacgcggtgagcggcgtatcctcggcaggcttgatcaccatggtgcaaccggcggccagggccgtggcgaccttgcgggtgatcatcatgaatgggaaattccatggggtgatcgcggcgaccgggccgatggcctccttggtcaccagcacagtcgcgttgcggtcatgggtggggatcgtgtcgccgtacacgcgtttggcctcttcggcataccactcgataaaacccaggccgtagtcgatctcgccacgggcttcactgaggcatttgccgttttcgcggcagagcaattcggcgaaggcttccttgtcggccttgaccgcgtcgtgccagcggcgcaggcggtcgctgcgctccttggccagcctggatgaccaggcgggaaaggcggcgcagacacggtcgacggcggctttgacctggctgctggtgttctgggcgacgcggccgacttcttcaccggtagcagggttgtagacgataagcatggggagtctccgagggctgaaagtgctgtttcaggctacgcagagacagtgtttgagcgaatatccattccaatgtgctgattgcctattcctatgaggacgtagcctggatgtggattgcgcgttaccgtggcactttgcacagaggcctggatccatggaccgtacagacagaatcatcgcgctgatggacgccctggcgcctgtcgagggctataacctgagcgcactggacgacgtgcgcttcctgcgctccaaccgtccgttgcagcgggtgccggtgctgtacgaccccggcatcgtgattgtctgccaggggcgcaagcgcggatatctgggggatgaggtctacctgtacgacgcccagcactacctggtggtgtcagtgccggtgccgttcaccatggagaccgacgccagtgaagccgagccgatgctggcggtgtacctgcgcctggacttcaccctcgcggcggagctgatggtggcgctggatgagtttccagcgctggtcgacgccaagccgcgcggcatgtattcatcgcccatggatgacttgctcggtgagtcgttgttgcgcttcctgcaagccatgcgcacgccgatggacgcgcacatcctcggcccggcgctgatgcgcgaaatctactaccggattctcacgggcgagcagggcggttcgatgcgcgccgcgttgaatcgccaggggcagtttggcaaggtggcgcgggcgattcgcaagatccatgggtgttatgcccagcacctggacgtggaggcgttggcccgggaggcgatgatgagtgtgccgagctttcacgcgcatttccgcacggtcaccgacacctcgccgatgcagtacctcaagtccacgcgtctgcaccaggcgcgtttgctgatgctgcgcagcgatatcagcgccgccacggcgagtgccaaggtcggctatgaaagcgcatcgcagttcagtcgcgagttcaagcgcttcttcgggcgcacgccccaggcggaaatccagtggatgaaacgcacctatgcgttgccggcgcctacgtcggcgtcgatgtacgtctcgtcccattgagcagggtcagcagcagcgccaacccggcgaatgctgcgccggtcagcgcctggccttgccagccgtagtgcgctgaggcaaaggcgccgctggccgagcccagggcgcccccgatgaagtagaccaccatgaaaacggtgttcaggcggctggtggcggccggttccagggccagcacgcgggtctggttggcgagctgattgatacggttgccgaggtcgaggaaggtcgccgcgatcaggatcggccaccaccagccctgggggccgaacaggtagatcagcacgaaggccgccagcacggtagtaataccgagccattccagaaaaccgccgtggcgccgagtctgccggccgatggtcgaggcgcagagaatgccgacgatggcggacaacccgagcaggcctgcctgggcgctggagaacccgtagggtggcgcggccagcagcgcggccatggagccccagaacacgttcagcgcaccgaaaaccagtgcagccttgatcgccgattgccgcagggtggggtactgcgtcgccaggccccacagggactttagcaaggctccgtacgccagtttgctggtggagaccgaggcgggcatgcgcgtcaggattgccatgaacagcagcacatccagtgcggcggcgagggcgaacatgccgcgccagcccagccagccgctgaccacgccgctcacagtacgcgccagcaggccgccggcggacaggccgctgaccatcaggccaagcaccgcgcctttttgcatggggtcactgaggtcggacgcggcggggatgatcacttgggcgctgatacccgagaggcccagcagtacgctggccaccagcaacacggcataggagggggcggtggccgaggccagcaggctggcaaagttcaggcacagcaccgcaagaatcaaggtgcgacggctgatgcggtcgcccagcggtacaaacagcaacagcccgcaggcgtaacccagctgggtgagcatcgcgatctgcccgacatgggcggtggacaccccaaatgtgtccgcaatcagcggcagcatggcctggttgtaataaatcgtggcgaccgaaaacccgcagcagatggcgagaatcagggtcaggcccttggtcagggctggggcgtgtggctgcatggcgggctcagtggtgatcgcaatggcggcgagaatgcagcgaagctggcgccaaatccagcgttgcagaggatcgggcaataactcggctggatcaggccatgctgtgcttggattgtctcactggcgggacaaacagtcgcgtttcaacggtctaatcctttattcggatcatctgtaggattaacctcacttgatcgccccaccgcgatcctcacttggagatcccgcatgaaactgttgcatatcgattccagcattctcggcgacaactcggcgtcccgtcagctcagtgcgggcgtggtcaaggcctggcaagcggctgaagcgggtgtggaagtgacctaccgtgatctggccagcgaaggcatcaaccacttttccggcgcaaccctcggtgccttgggcactgccgctgagctgcgtgatgccgcgcagaagcatgaggctgacctgagcgcttcgtcgctggctgaattcctcgctgccgacgcggtagtggttggcgcaccgatgtacaacttcaccattccgacccagttgaaagcctggatcgaccgtatcgccgtcgccggccagaccttccgctacagcgaagccggccctgaaggcctgtgcggcaacaagaaagtcatcatcgtgtccactgcaggcggcctgcacgccggccaggcatcgggcgcggcccacgaaggctacctgaagctgttgtttggcttcctcggcatcaccgatatcgaaatcgtgcgtgccgaaggcctggcctacggtgatgaagtgcgcagcaagtccctgaacgacgccaacgtagtcatcaacgaacaattgttcgccgccgcgtaaggcttgtgtaaattccgcctttgctcggtttcattctgaagccgggcgcctaaactctgtattctgctcgcctcaaaacgaacggagtacggagttttttcgtttagccgctgtcattactttggcccaggttgtgcaagcatgggtttaacgccctggacttttttcgatatgtttgttctcacgcagcaaaggtggacatccccatgatgcgtctttgtgctgttatggttctttccctgctcggcggcctgatttcagtgcacgccgcacccgcgccgcacccgcattggagtgtgggctttcatcgcatgacgtttctcgatccgctggacctgcaacccatgaaggcgatcgccttctatccctctaccgatctagagcacaccacgcaattaggcgcctatcacgtcgccgccaccgaagattccaagatcgccatcggccgtttcccgatgctgatgctgtcccacggcaacaccggtacgcccctggcactgcatgacctggccacctccctggcgcgcaaaggctttgtggtggtggcggtgctgcacccgggtgacaactacaaggatcacagtcgcctgggcacggtgagcaacctgtacggtcggccgatccagatttccgaagcgatcaccgccacccttggcgacccgatgctgtcgccgttcgtcaacgtcgaccaggtgggtgtcattggttactcagccgggggtgagaccgcgttgatcctggccggcgccaagccggatttcgaccgcctgcgccggtattgccaggagcgtccggaagatcgcgacgcctgcaccaccaagggcgaactggtggtggaccgtgacgacctgcaaccgcaatccgacccgcgcatccatgccctgatgttgatggcgccgctgagcctgatgtttggccgccataccctggccgatgtgcatgtgccggtgctgctctacagtggtgatggcgacaagttggtggcggtggataagaacgccgctgcgctggcgcgcaaactgccggagccaccggacttcaagctgttggccggggcagggcacttcgtgttcatggcgccgtgcgacagtgatcagttggcgacgatgccggcgatttgcaccgatgccgatggggtcgaccgcgaaggcattcaccgcgacctgatctccgaggcggggcggttcttcagtcacaccctcggccaatccacccgcgcaggcttgcagaccgctgatcagtaagcgcggcgcataagcagcagggtcacgcccagggccgtgaccgacaacagtgcggcacagaagaagatccagccgtagccgaggttgagcgccacggcgcccatcaacggcccggcaatcgccagggccaggtcaaaaaacaccgcatacgcgctcagccccgcgccacggctgctgttgggcacctgcttgatcgcttccacacccagcgcggggtacaccagcgacaagccgaagccggtcagcccggcgccgatcaatgccactccagtggacggcgccagccacagcagggtcaggccgagggtttcgatggtcatgcaggcaatggctgcgcggaacccgccgaaacggctgatggcagagataaacaccagtcgcgacaggataaagcacacgccgaataccgtgaggcagtacgccgcgccggcccagccgcgattgaggtagtacagggtgataaaggtagtgagggtgccgtagccaatggacgccaggcacaggctggcgccaaacggcgcaattcgcccgaacacggcccagaacggcaggcgctcgccgcgcaccactggcaccgagggtttattgcggatcagcagcaacccgagtgcggacaatactgtcagtgcgatgccgaggctgttgtagccatattccgcgaccatcaccacgccaagcggtgcgccaatggcgatggcaccgtaggaggcgatgccattccacgagatcgaccgtgcagtgtgttccgcaccgacggcgcccatgcaccaactgatggtgcccacgccgatcaggccttgggccacgcccagcagcagccgcgcaacgatcaggatacccaggctcaacgatggcaggcttgccaccagcgtggcgaagaacgtcagtacgccactcagcagaatcccggccaggcccagcacaatcgcacgcttggtgccgacgttgtcggacatgcgcccggccatggggcggctgagcagcgtcgccaggtactgcgaaccgatggtgatccctgccaccactgcgctgaaacccagttgctcatgcacatagccaggaattaccgcaatcggcaggccgatgcagataaatgcgatgaaggtgtagaagacgatggagacgatctgcagggtgatcgatatcgagctgggggcggcggcaggcatgggcactcgttcgcgggcgggcggtgcgggcatgatggcaagggcgcgggggaaaaggaagctggctaactactttgtctgatgaaccggctttgcgcggtaaacgatgccgttgtggtgagcgggcttgccccgcgttgggctgcgaagcagccccaatagaaaacaccgcgttctgtcagacagagcgcggtgtttttttagggccgcttcgcgccccaacgcggggcaagcccgctcgccacaacaagcccgctcactacaataaatcgagtgctttagaacaccacaccctggctgcgcaggtaatcgtcataggtgccgctgaagtcgatcacgccgtcggcgctcaactcgatgatgcgggtggccagggacgagacgaactcacggtcgtggctgacgaagatcagcgtgcccgggtagttctccagcgccaggttcagcgcttcgatggattccatgtccaagtggttggtcggttcgtccatgatcagtacgttcggcttttgcaggatcagcttgccgaacagcatgcggccttgctcaccaccggaaatcaccttgaccgacttctggatttcgtcgttggagaacagcatgcggcccagggtgccacggatcatttgctcgccttgggtccactggcccatccagtcgaacagggtcacgtcgtcttcgaagtcatgcgcatggtcctgggcgtagtagcccagttccgcggcgtcggtccacttgatgctgccggcgtccggggtcagttcgttgaccagggtgcgcagcagggtggtcttgccgataccgttcgggccgatgatcgccacgcgctcgccggcttcgacctggaagctgaagtccttgaacagcggtttgccgtcgaagcctttggccattttttcgaccatgacggcctggcggtgcagcttcttgttctgctcgaagcggatgaacgggctcacccggctcgatggcttgacttcggccagctggatcttgtcgatcgccttggcacgggaggtggcctgcttggctttcgaggcgttggccgagaagcggctgacgaaggattgcagttcggagatctgcgccttcttcttggcgttgtccgacagcagttgctcgcgggactgggtcgccacggtcatgtactcgtcgtagttgcccgggaacaggcgcagctcgccgtagtccaggtcagccatgtgggtgcacacgctgttcaggaagtgacggtcgtgagagatgatgatcatcaggctggagcgctgggtcaggatgttttccagccagcggatggtgttgatgtccaagtggttggtcggttcgtcgagcaacagcacttcaggatcggagaacagcgcctgggccagcaatacgcgcagtttccagcctggagacacttcgctcatcgggccgaagtgctgttccaggggaatgcccaggcccagcagcagctcaccggcgcgggattcggcggtgtagccgtccatctcggcgaactcggtttccagctcggccacggccatgccgtcttcttcgctcatttccggcagcgagtagatgcggtcgcgctcggccttgaccttccacagctcttcatggcccatgatcacggtgtcgagcacggtgaattcttcgtaggcgaactggtcctggcgcagtttacccaggcgtacgttcggctccagcatgacctggccgccggacgggtcgaggtcgccgccgaggattttcatgaaggtcgacttgccgcaaccgttggcaccgatcaaaccataacggttgccagcgccgaacttgaccgagacattctcgaagagcggcttggcgccgaactgcatggtgatgttagctgtggagatcaattactttacctatcaatgggttgcgagcgtgtcggcaggagccttcaggcatgcgtcaacagcgacatcaaggcgcgaaacccggtcgctgagcagaaaatgggggatgtgtgttggaatttggcgcgcattgtcgcatatgtcaggcgacagttgtatgtccggcgaaggaaggtttcgccagggtctccggcattgccagccataacaacgccaaggccagcgctgcgaccccggccagagtcaggaatgccgcgttgtacccggcctgttgcaccacgaaacccgccaggctgctgctcagtgccgcgcccagaccaaacacggtggaaagggcgcccaggctgacgttgaagcggccggtgccctgggtcaggtccttgacgatcaccgggaacagcgcgccgaagattcccgcgccaatgccgtcgagcatttgcacggccaccagccaataagggtcgctggacaaggtgtagagcacgccgcgcagcggcaggatcatgaaaccggccatcagcagcggtttgcgcccccacaggtcagccttgagcccgaccagccaggccatcggcaccatcaccaactgggcggcgacgatgcacgccgaggtcagtggcgtggccatctgcaggttgatctgcgacagcttctggctgaccagcggcagcatggcggcgttggccaggtgaaacagcgcgcagcagatggcaaacagtagcagcgggcgattcgccagcagcactttcatgccggatggttgttcatggtcggtgtgatgtgccgggtcgaagccgcgggccacttcatggtcgatggcctcggcggacacacagctgatcgcaacgatgctggcgagtgccatgaacgccatcaggtaaaacaccaccactggaccaaacaagtaggccaggccgccggccaacagggcggccacggcattgccggcgtggttgaaggtttcgttgcgtccggtgcggcgggtgaacgcgcgcggcccggtgatccccagggagatcgcggaaatcgccggtgcaaacaccgaggcggcgacggcactggcggcctgggtcaatgccaccaggctgaacgagctgacaaagggcagcagcaggcaactggcggttaccacaatagcggccagcgcgatcaccgcgcgcttgctgcgggtgcggtcgatcaatgcgcccgccgggccttgggtgatcaatgcggcgatacctgccagggtcatgaccacgccaatactggccgggtcccattggtgcacggccagcaggtaaatggccagatagggtccgaggccgtcgcgtacatccgccaggaagaaattcaggctgtcgagggacaaggtgttacgcaggtcggaatgtttggccacggcgagcacttcgcaagcggtgttcaaggactgaacacgcattgcgttagtgacccgcaggcgttgcgttaagtttcgtgcgttagccgggttttattccgtgggtacatggcttattttctgagcccctctgtatggattatctggagacgcaatggacatgccctcagctcaacaggcgattgcctgcaacaaagacgcctgggatcaatcggccggcctgcacaagaccaccgacacctggaacgcgttgctcaatagcgtcggccaagctgacttttcctgcctggatcctacgattaccgggctgctgcaagacgttggcgtggccggcaaagatgtggtgcaactgtgctgcaacaatggccgcgaaagcctgtcgctgtttggcctgggcgcacgttcggtggtgggcgtggaccaatccccggcgttcctccagcaggcctgggagctggccgatgtctcgccgcacaaccctgagtttatcgagagtgacatccatcatctgccgcaggcgttacacgggcgctttgacatcgccctggtgacaattggggtgctgggctggatgccggacgtggcgctgttcatgcagcaggtcgccctcaccctgaaacccggcggcaccttggtcatgtatgaaacccacccgtttctggaggtgttcgatccacgggcgccaaacccgttcctgccggccagttcctacttccagcacgaacccttcgtactgcaggagtcgattgtctatgaggggcagggcgaggtggccgggccgacgtcctattggtatgtgcacaccctgggcgatgtggtcagtgccgcgattggcgcccagttgcagatcgttcacctgcaggagtatccccactccaaccgcgaagaactctacgaccaatacgagcaccagcccgcacaattaccgatgtgctttaccttgaccgctaccaagcgtctcgactgaggcgtctttcagtcgcggcgcacgaacgtgcgcatggtttgcccagggcctgtgctgaacgtggttggcctgggcataccttcgtcggcggcaatgaacacaaattcatcaccgtcgaggcgataactggcgggcaagtgtttgccggcgtcatctcccatggagtcgatccaggtaatgcgcttgggcactgtgctgctgtcgaggaaaaaacgtcctgccagcaatacctcgccgctgaccgtcttcacttcgaagccgtcgccgctgatcgtggtgattgcgccaggggccgtgtgcgcgtcgatggggttgagcacgccgctgtcttcgagtgaggtttgctcccacgcaccttgcagggcttgaaagtctgggtctgaaagggatgacatacaaattcctttttgttgaaggggaaatcgtcgatggcgatgccttttatcatttgaagctggattacgcagcacattcgcaagacagcttttcacaattcttagttaacttttggttacaacctgtggctaaataactgcaaagggccacgcgccgggtggtcactcagccggtcgtgccgattgtgtgaattgtgatttcaggtgctgctatccatcctcgtccgttgtgggcacgcaggagcagcctgttctcttctgacttgtgacgaaatcccttgaaactcatcattgttgttctctacgttgcctcgattgcgtatgtacacttacgtggccgggtgcggcataagctgggccgccaactcagcgatcattcgaccttcctggcgccgatcaactgctttctctatctcttctctaaactacccagccgaccctacctgtcgcccaacgatttccctgacctgagcccgctccaggaacattgggaagagatccgcgaggaaggccagaacctgctgcgcgccggcgaaatcaagcgctcggagcagtacaacgacgtgggtttcaactcgttcttcaagtcgggctggaagcgtttctacctgaagtggtatggcgacagccacccgtcggcgatgaagctatgcccgcgtactaccgaactggtgcagagtatcggttcgatcaaggccgcgatgttcgccgaactgccgccgggctccaagctggtgcgccaccgcgacccgtatgccggctcgtatcgctatcacctgggcctggacacgccgaacgacccgggctgctacatcaacgtggacggcgagaactactactggcgtgatggcgagccggtgatgtttgacgagacctacatccacttcgccgaaaacaccacgcagcagaaccgcatcattctgttctgcgatatcgagcgcccgatgaaataccgttgggccgcggcgttcaatcgctggttcagccgcaacgtgatggcggccgcgggctcgcccaacgatgccggcgacaagaccggcggcctcaaccgcgccttcacccggctgtacaagattcgcttgcgcggtaaagagctgaaaaagcgcaaccgtacgcgttactacctggaaaaatgggcgatcttcgcaaccctggcggcgatcttcctgctcatctgagtgtttcgggcgccattcactccagtggatgagcgcccagtttgtcccacatcttcttgctgattttctgtcgattggcatagccgtcccagggatcgcccttcaagccatccaggcgctgctgcaggttggcgaccgtccattgctgtgcactgcgcaaccccttcaattcctcacgactgaccggcaccgacaccggcaaacccgggcgtgcccgcacagagtaggcggccacggtgctggcgccccgcgcattacgcaggtagtcgatgaagatcttgccgacccggtttttcggtcctgacgtcgcggtgaagcgttcaggcagttgctcggtcatgaattgggcaatcgctttggcgaacgccttgacggtgtcccagttgtctcggcgcgccagcggcacgaccaggtgcaggcctttgccaccactggttttgacgaaggcttgcaagcccagctcgtccaagaccgagagggtgagctgcgccgcttccagcatggttttccagggcagcgccggatcagggtcgaggtcgagtacaaataggtccggggtttcgatcttgtcggcggtggcgccccaggtatgaaactccacggtgcccatctgcaccgccccgagcaacgctttggcactgtcgacttccatcaggcgcgcgtggccagggtcgagcgcctgatccagctgcttgatgttgggaatggccaggcgctccgaatgtttctggaagaactgctctccctcgatgccttcaggcgccctcagcagtgacacgggacggtggcgcaggaacggcaggagccactcgctgatgccgttgtagaactgcgccagttgctctttctgtgtgccgctctgctggtcgatcacgcggtctgggtgggtgatttttacgctgccggtgttttttttggcaggcttcatggatttgctcgtgcgcggttgctcatgaatgatctgcgcggccggcttgtcgctgcgcattgcgacgaacgccgcctggcgcaccacgcctccacgggtccattcggcaaactgcacttcaccgaccaaggtcggctccacccagtgcacgccacgggcctgggcactggtcagcggtttccccagcggcgatgacgtgcgctccaatggcgtgagttgcgcatggatcgccttcagtgatgcttgatcaaatccggtgcccacgcgtccggcatacaccaatcccgacgcttcattgaccgccagcaacagcgcaccgaaaccactgcgcgaaccctgcggccgggtgtagccgacgatcacgaattcctggcgcaggcggcatttgagcttgatccaatcggcgttgcgactggacacataagggctgcccaggcgcttgccgatcacgccctcaagggccaggtcacaggcgctttcaaaaatgtcccggtgatgggcggtaaaggcttcggagaatcgtaatagcttgcttctgctgccagccaacgcagtctttagcgccgcacgccgatcctcgacgggggcctcgcgctgatcctggccatccaggaatggcgcatcgaacaggtagtagacaatgtccaggctgcgcccgatatcgaaggcgttttgcagcgcctggaagtccggcaggccgtcgccgttcaggctgactacttcgccgtcgagccagctgtcgttgagcttcaaagcttgcaaggccttggtctggcgcggcaggcggtcggtccagtcgtggccgttgcgcgtgaacagccgcacctcgccgtcgcggatgcgcgcgagcatgcggtaaccgtcgaacttgatttcgtactgccaatcgccctcgggcgcgcgatccaccagggtggccaattgcggggtgaaatgctcgggaagggtcgccttggtttttcggggttttgcgcgaggcttgggtttacccaccgaggcggcgctgagcacgctgtccggctgggcctggacaatatcgtagtcttcggcggggcgtgcctgcgcgtcctgttccttgatcagcagccattgctccttatcgccgctgcccttcaggcgtgtgcgtaccaatgcccaatcgcccgaaagtttttcgccgaccagggtgaacttgagcttgccggcggcgtaggctttgcgcggatcgtcatggggttgccacacgccacggtcccacacaatgacctcacccgcgccgtactggcctgccgggatattgccttcgaagctgccgtagtcgagggggtgagcttcgacatgcacagccaggcgcttctgtgcagggtccaggctcgggcctttgggcactgcccaactgagcagcacaccatccagctccaggcgaaagtcatagtgcaggttgcgcgcggcatgtttctggatcacgaaggacagcgccgacgccttgcgtttacctgcgggcgcactgcctgccggttcacccgtaatgccgaaatcgcgcttgcggttgtattcgctgaggggcttgggcatgacttatgaggccttggtggatttcttcgcggcgggcttcttggcgggtttgccggccaggctgcgcttgagcagttccgtcaggtcgatcacgtcggcggacttgcgctcttcactgtcttggcgggtttccacatcttcgatcttgccggccttggccttcttggccaccagcgccatgattttttcctggaagctgtcgcggtaatcatcgggttgccagtcggcgctcatgtcgtcgaccaggcgcttggccatgtccagctcacccttggccagggtaggtttagtcacgtcgctgcccagttccagttcgtccaggctgcgcacttcggccggccagcgcagcatcaccaataccagcgccgactccaatggcatgagtgccgccaggtgctgcttggtgtgcaggaccacgttggccagcgcgacttttttggtcttgctcagcgtttcccgcagcagcgcgtagaccttgccaccgcgcttgtccggtgccaggaagtagggcgtgtcgatattctgcagcgggatctggtcactggcgacaaacgcgatgatctcaatggtctgggtcgacttggggtgggccgaacggatttcctcttcgctgagcaccacgtagcggcctttcttgaaggcgacacccttgacgatattgtctttagtgacttccttgccggtggtcttgttgatgcgcttgtagccgacccggtccatgctgcgcttgtccagccagtcgaagtcaacgccctgcgatgacgtggccgagaccagcgacaccgggatatgcaccaggccaaagctgatggcgcctttccagatggctcgtggcatagctgcgattccttgagtagaggctgtgtgcggatgactcggcgccggtgtggaaagtttccccaggcggatgcgcggacagatcgtgttacacctgatgagaaagtatttagtgtcgaaaggcgaaccctgggcgtagcgtgttatcgaaagcacgtactcctcactcccgagaggctttgtcaatgaacacttgtatgcgtcacgttgcagcgctgctgttgggcctggccctggttcccgtggtccaggcgcaaaacctgcccggcagcaacaacgccaacaacggcccgatccaccgggccaaccccaacagcatgcagggcacccagcccaacgcgccggccattcgcgggattcagaccgggccgaccacccgcacgccgaccctggaaaacggcggcattggcaacagctatcccaagcgcgacgccgcccccagccgcccggccaccgaaaccaaagcccccacttatgatgccaacggcaatcgccggtaaggattccgtcttatgtttctacgcaaaaccctgctagccgcgctgtgcgcaacctcgctgttgccgttgacggccacttttgcaactgatgcccagcagttccccagcgaacaaggcagtctctccgtcacgccgatcgccaaaggcctggaccacccctgggccgtggcctttctgccggataaacaaggtttcctggtcaccgagcggcctggtcacctgcgctttgtcagccccgacggcaaactttccgcgcccctgaccggcgtgcctgaagtgtgggccaaagggcagggcggtttactcgacgtggtgctgtcgccggacttcaagcaggaccgcatggtctacctttcctacgccgaaggtggtggcaaaggcggaaccgccggtactgcggtagggcgtggacgtctggcggctgacctgagtggcttgactgactttaaagtgatcttgcgccaggagccgaagctgtccaccggcaaccactttggttcacgcctggcgttcgaccgcgacggttatctgttcgtgactctgggcgaaaacaacgaccgcccgactgcccaggacctggacaaattgcagggcaaggtggtgcgcatctaccccgacggccgcgtgccggatgacaaccccttcgtcggccagcccggcgtgcgcccggagatctggtcctacggccagcgcaacccccagggtctggcgttgaacccctggagtggcacgatctgggagaacgaacatgggccacgcgggggtgatgagatcaatatcatcgagcgcggcaagaattacggctggccgttggcgacccacggcatcaattactccatggcaccgattcccgaagccaaaggcaagaccgcagaaggcaccgtgccgccccatcatgtgtgggaaaaatcaccgggtatcagcggcatggcattctacgatgcagaccgcttcaaatcttggcagcacaacgtgttcatcggcgcgctggccagccaggagctgatccgcttgcagttcgacggtgacaaggtgattcacgaggagcgtttgctgggcggtttgaaagcgcggattcgcgatgtacggcaggggccggatggctttttgtatgtgctgacggatgaggataatggcgtgctataccgagtcggcctcaatcaggactgaagccgacgacaacctgtaggcgcccggcttgccggcgatggcgatttgagcaacgccatcgccggcaaggtttacaggcccaggtcagacagccccggatgatcatccgggcgccgtcccagcggccagtggaatttgcgctcgctttccttgatcggcatgtcgttgatgcaggcaaaacgattggccatcaggccgttctcgtcgaattcccagttctcgtttccataggaacggaaccagttgcccgaatcgtcgtgccactcataggcataccgcacggcaatgcgattgtcggtaaacgcccacagctccttgatcagccgataatccagctccttggcccatttacgggtcaggaaacccttggcctcttcgcggttatgggcgaactcggcgcggttacgccactgcgtgtcgagggtgtaggccagggacactcgatgtgggtcgcgggagttccagccgtcttcggccaaacgcactttttcgatggccgatgcgcgggtaaacggcggcaggggcggacgtgtttctgcagtcgatgacatggggcagttcctcaaacaatcagggtgggttgaaagttgcgccgttgtgcgatcaaagtcccaacaaggtttgcgccatgcattgcgcattatcggcagctgttgaatcgcccatcaccagggcaacggtaatggcgccatcgaccaggatcagcaggtgcgcggcctgccgttcagggtcgggggtgccatgtgcttgacacagttcgagcaggtactcgaacagtttctgtttgtgggccttggccaactggcgcaccgggtcctgcgggtcgccggtttcgccgctggtgttgatgaaggcacagccacggaaatcggcggagccaaaccaggttttcagtgcatcgaacaccgccagcaggcgctcgccggtgccttcgctgcgttccacctctgtgcgcagccacagcatccagcgctcgtcgcgccgctgcagggcggcaatcaccaaatcgtctttattggcgaagtagcggtagatgctttttcgcgagacgccggcggttttcaccaggaagtccatgccggtggcggcgatgccgtggcgatagatcaacttttcggtgacgtcgaggatgatgtcgcgggtttcattatgggtcatgtcgttcatgttgcgaacagtagaacgatcgttcttcttggtcaattaaaatttttccatgcgccacggcaagacctgaggccccccatggtgtaagctcggggcctcttcggattcgacccattgcgagccttatgccgtcgttcttcaaacgctccctgttgcccaaactgcgcggttttcccctcactcctgatgcgattgacgtgctgtgcggcgccgctgcctatcgccgctgcctgctggagaaaatcccccaggccacccggcgcatctacatcgtcgcgctgtacttgcagcaggacgaggcggggcaggagatctacgacgccctgcacgccgccaaggcagcgcgaccggagttggacatcgtggtggtggtcgactggctgcgcgcccagcgtggcttgatcggcgccggcaagcagccgggcaacagtgcctggtaccaggccatgacccagggccacagcagtgaagtgccggtgtatggcgtgccggtgcaaacccgcgagttgttcggcgtgctgcacctcaagggctttgtgatcgacgatacggtgctgtacagcggcgcgagcctgaacaacgtgtacctgcacaagttcgacaaataccgctacgaccgctaccacctgatccacagccaaccgctcgccgactccatgcagcatctggtggagcacggcctggtggcctccaaggcggtgcatcgcctcgacctgcccaacccgcccagcacccgcagcctgcgcaacgacattggcgacctgcgcagccgtctcaagcacgcgacatacgacaccaccaccgggcaattgcccaacggccatctgtcggtcagcccgctgctgggcgtgggcaagaacaatccgttgagccgggtgatcctggagctgatcgccagcgcccagcatcaactgaccatctgcactccgtacttcaacctgccgctgccagtgacccgcgaaatcaaccgcgccctggcgcgtggggtaaagatcgacatcattgtcggcgacaagaccgccaacgacttctacatcccgcccagcgaaccgttcaaggtgatcgccgcgctgccgtacctgtacgagatcagcctgcgccgtttcgccaagcgccatcagcgcgacatcgaccacggccagttgaacctgcacctgtggcaccacgacgacaacacctaccacctcaagggcatgtgggtcgaccagcgctacaccttgctcaccggcaacaacctcaacccgcgcgcgttccgcctcgacctggaaaacgccttgctgatcgatgatcccaagagcgagtggctggagccaaggcgtaccgagctggcacagattttccagcacaccacgcgtatcgaacggtatcaggacttgcagacgctgcctgattatcccgaggcggtcggcaagttcctgcgccgggtcagccgggtacgaatcgagcggttgttgtatcggatcctgtaaaacccgcaggcaaaaaaagacccagccccttcaacagggctgggtctttttttgtgctgcttagttcaggcccagcttaccccgcaaggtggacaggtcttccgccagggtattgaccggacccaccagggccttgcggtcgttttccttgaccttgtcataggtttcgaaaccgccatccttggtcttgtacttggcgaggatcttgtccacgctggcgaaattcttgtcgaccttggccaggaaggccttgtcttgcttctcgatctgcccacggaacaggtcgacgattttcttcgcgccgtcgatgttgccctggaagtcatacaggtcggtgtggctgtagcggtcttcttcgccggagatcttggtggcggcgacttcttccagcagcgctgcggcaccgcctacgactttctcgggcgggaaggtcaggccgtcgacgcgggtcttgaggtcgttgacgtcggtgttgagcttggcggtcagcgcttccaggcccttggtggtgttctgcgagaacagcgcgtattcgatacggtggaagccggtgaagtcttcggcggtcacgcctttttcgtggtcgtcgacacgggagtcgatggacgcatcgaggtcgctgaacagctcggcgatgggctcgatggactcatagtgcacgcgggtcggcgcatagagcttcttggcggtggccaggtcgcccttgttgatggcgtcggtgaacgcctgggtctgggtgaccagctcaccgatttcctcggtgacgtagatcttgtagtccgacaccggccctaccaggtccagcggcgcggtggcggcgaaggctgccagcggcgaaagggtcagcaacaacgacaacgcaatagtcgacttcttcatgggacggtatccgctctgagtgtgtttttaggtattggcagtggtttgagggtgcgttgcagcaagcagcgtgcgcccgatgaaatcctgggccccggtgacgcctggcaaggtgaagaaatacccgccgccgaccggcttgaggtattcctccagcggctcgccgttgagccgggtttgcacgctgataaagcctttctccaggtcagcctggtagcagatgaacaacagccccatgtccagctgaccgttcttgttgacgccgttggagtagttgaacggccgacgcaggatcaggttggcctgggtctgcggggtgcgcgggttggccaggcggatgtgggcatcgagcttggtcagtttgccttccgggtccttgctgtagtcgggcacttgggtttcgttgtggccatccatgggcgcaccggtgggcttgacccggccgatgatgctttcctgctcctgcaacggagtgcggtcccagcgttcgacgaagttgcggatgatgcgcacggcctgatagctgccgttggcggcccaggccggttcgtcgctgccgggctgcacccacacaatctgattcatggccttggcgtcgttggagttcgggttggccgaaccgtcacggaagccgaggaagttacgcgcgctctgggccggctcgccgggcttggcaggcgcctggggcggtacgctgccttcctgcttccagcgcaccagcagcaggtcgggcaggtttttcacgatgtcgcgcaaggcgtggatattggtgtccggggtgttggagctgaattgcaggctcaggtcgccgtggcattgcgccggctccagcgcatcgttggggaacccgaccatgcggctcaggcgcttgggtttgactgccgtgaggccaaagcgctcatcgaacagcgattcgccgacggacacggtgatggtgaggttgtccggggtgaccaccgggccgaggatgccggagtcggtgggcggcagtttcgggtcgacctgcggcacggtgccgccggtcatgagaaaggcgatgcgttcgttcagcgtacggaacaggcgctccaggtcgtcacggtcgctggctagtacgtcgaacgcaacaatcatgccgcaggccgggcgtggggtgacgataccgctctggtgtttgccgaagaaatcgtggtggtcctgggtcttgtcactgcgcggcgcggtggtgacttgctcggccgcagcggccatggccgggcaggtcagggcgctgccggcaatcgcggcaccggtggcggccatgcccagcaggacacggcgacgctgaaggttggtgtgttctgaatcactcatgtgtgcggtcgtcttcactgcaggccggaaaggccaagggcggggtcgattccatcgagtgcaacggccagagccttggccttgccggcgatctgcttacgctgatcggcggttacggtgtcgtaggtggcgtagcccttgtcgaccttgaagccttgcagttcggcatcaaaggcggcgagggcgctgtcgattccaggcaacaggtcggcggcggatttggtcagcagcgggcgcatcaactcgaccaccttgtgggcggcctccaggttggcggcgaaaccattcaggtcgacgtggctgtagcgttcttcttcaccgctgatggcgcgtacatcggccaggctgttgaggttgcgcaccacgatgctgaccaactgctccggcggcagggactgggccagcaattgttgtttgagggcgctgacgtcggtcagcaggcgctgggcaaccggcgccagcccgtcaaggctgcgttgctggaacagactgtattccaggcggtggaagccgctgaaggccgggtcctgttcgcgtttttcaaaatagtcggcacgggcgttgatcgcgttgtccagttgcgcgaggcgttgcgatgccggggccaggcgttggtaagcctcccgggccggtacgtagagcgcttgggcctgggccaggtcgccatggtcgatggcctgttgcaacgcgctgaccgccttgaccagtgcgctgccttggccgctcaagtacacgcggaattccgacaatgggccaatgaacgccaccatcgacggtttggccttggcctgggcgtcggactcggcagtcggtgttacgtgcaaggtgccacgcgggttgctcagcaggccacaggtgatcgcgtagtcaccgggcaacaggttggcgttgatcacctggctaagcccgggggcgatgttttcccgttcttcgaccaccagcacgccgtccaggatctcccattccaccgcacgatcggagcggttgatgatgcggaagctggcgcggccggcggggaccgtcaattcattcggttcgcaggcgtgaccatgaatgatcacggcgatttcattttggttggcctggcgcttgctggcggccagctgtgaggcgtaatagaacaggccaccggcggcgatcatcacgaccaccgagcccgccacagcccagcgcagggcgcgaggtggcgaaggcggttgaggggttgggttggacaagagacggtccttactgactggaagcggaagagggtgtgatggcctgcttgggtggcgcggcgggcaggaagaacatcaccagcgccaccaccaggtaaatcaggtaggcgccgagggtgctgacggtgggcgcttcctgatagccgaacatgccggcgagaaccgaacccagcgggctgtccatgggcagggcggcgctgaagtcgaagagcacggtttgcaggtgattccacacgcccgcttcgtgcagggcctgtaccgaattggcgaggatgccggcggccaccaccaggatgaacaagccggtccagcggaaaaacgcaccgaggttcaggcgcatgctgccggtgtagatcaggaaaccgacgatgatcgccaggatcaggccgagcagggcgccaatcggtgcgccggggccttcgctctgctggaacaccgccagcaggaaaaacacggtttccaggccttcacgggccacggcgaaaaacaccatgaggatcagcgcagtgacttggtgtttggacccggccaacgcgtgatcgagggattcgtgcagggagtgcttgatggaacgcgccactttacgcatccagaacaccatggaactgaggatgcccacggcgaccaggccaacgatgccttcgaacagctcctgctgcttttgcgggaactcggcgctgaccagctccagcccaccacctaccagcagggccagtgcggcggcgagaaacacgccgatccacaccgcaggcatccactggccacggccggtctgttgcaggtaactggcgataatgccgacgatcaatgcggcttcaatgccttcgcgcagcatgatgagaaaaggaacgagcattcggcaccgcgtcacaactagataggaggctaagttgtaacataatgatactcattactaaacaggcaatcttgacaatagctgaaccctacctgaacggtggtggcaaaacgcatcccaccttatgatgcgtgccattatttgcgccgccggatgcccgtttcgccatgtcggaaaaagacaccatctccctccacctcgtgcgcgaagccttgctgcaaagctgcgcgcccggcgcggccagtgccgaagtgctgcataaagccgggattgacccggcactgctggccgagcccaacgcgcgggtctcggccactacctacgcacgcctgtggcgcctgctggcgcgacgcatggatgatgagttcttcggcatggacccgcgcaagctcaagtccggcagcctggcgtttctctgccgcgccgcgatggcgcaacccaccctgggcaccgggctggaaaccggcttggggtttctgtcgctgatgctggagcgcctgcccgccgagttggtgcgtcaacaaagcctggcggagatcgtattgctggagctcgagtccgaacccaatcgggccttcacatactttacctattggatgatcgtgcacggtgtggcctgttggctggccgggcggcggatcccaatcctggcgattgagctgcgctgctcaaaaccggatttctgtgatgactaccaggtgatgttctccgacaacctgcgtttcaaccggccccgcacccgcatgatcttctccgccgactgcctggacctgccgatcaagcgcagcccggaggagctcaagcgcttcctggcccacgcgccggccaacatcctggtcaaataccgcgaccccgccagcctcgccacccgcatcaagcacgacctgcgccagatgcctcctgacacctggccggaaactgacggcctcgccgccagcctgtgcatttccgcctcgaccctgcgtcggcggctggcggaagaagggcagacctatcaggggctcaaggacagtgtgcgcaaggagttggcgattgtgtggttggcggagccgcagatcagctttgccgaaattgccgagcgactgggctttgccgatgcaagttcgttttataaggcgtttcgtaaatgggtggggtcgaacccggggcattatcgaagtttgattctgaatgaaacaaacaagcggtaacggtgtggatgtgcgggattaggaaataacttacccgcttcttctttcggatgacagaacggtccttcgctattttaggaagtgctcggcttgccgccatttcttcttcgtgcatagttatcctcacggtacctgaatacgcctattggacgattcgattaatgtgctgcgcttacccgcgacggcgggtgtgcgctgctgaatcgagggcagcctatgcgcaaataaaaacagaacgattacatgaacaccaacaatcttaatggcttgaggtggaaatcatgaaaagtagttttgcgttggtttttgcgggattgatgttgatgtcggcgcaggcgtcggcgttgtgtacctatattacggagagctacggcggcactattccgccgaaaacggcgatacctgccaaagggccttttgagaacacctccgttaatggctgtttgaacgccagtattgatgccatcgtaacagccaccggtgcagggaacaccccggagatctatatcgaaggcgaggtgggaggtggatcatggcgacggttgacgttcagtatcggcagcaacgcttcttgggtaggtccgttcggtaagtacagggtggtggtgtataacgacgactcggtaccaaaagtctactcgggaagtgtcaggtacggtcgttgaaaccgaacctatgcagtgtgccggaagttatccggcacacggccttctgtgaggtaaattcagaaatcatgcacgctcgtcaattgataaatcgtcatttgacgagtttgcgaaataggccaatgcggcgagcgcgtgattcgctgccaccagtcctctcataaaatctgaagcaccctcctgatgtgctacatatggattgcttttgaaaaagtctatatatccctccagctgctcgttaaataacgcgacggcattgaatttgacatgggtctctgcaggaagtccgtttgcatcaaacgctccgtttcctacgacgaacagccaataagcgcgggaatcaataatgcctttgtcgtagagttcgctacctacttttttcaggtcgttactgctgatcgacgtcatgtcgtggcccttcagaaaactcttcaattcactgatttgctcctgctgccaaaacttcagtgtctctgccgcttctgcttcttcagtcttagtgaatgcgttcacgacttgttcaggatttttgatggtgtaaccaggggttgccattgagttctgcacttgacctgtcgctgataaggtaaccataaaaagcctcaagtagttggggttacatctggttgtcgacaagttggtgagtttcttaagtgctgaaaatgtttcgtattggggtggcgttattgtcagtgttgagcggttgtgtgggattgtgcaggtgggcatggtattaggagtgtttgcatgtggactaccttcatgtctgacagaactgtctggcgatgttttagataagtcctgaaccgcctgacttgtctcaagggactacagaaaggtccttcgctattttaggaagtgctcggcttgccgctgtttatttttcatgcatagttatcctcacggtacctgaatacttctattggaagattcgatcaatgtgcttcgcttacccgcgacggcgggtgtgcgctgctgaatcgagggcagcctatgcgcaaataaaaatagaacgattacatgaacaccaacaatcttaatggcttgaggtggaaatcatgaaaattagttttgcattggtttttgcgggattgatgttgatgtcggcgcaggcgtcggcgttgtgtacctatattactgacagctatggcggtattatcccgccggaaacgaccgtcacagcaaaagggccatttgaaatcaccccttcgaacggctgcttgaatgccaacattgaggcgatggtaacgcccacaggagctggcaaaacgcccgagatctttattgaaggcgatgtgggtggcggatcatggcagcggttgacctacagtatcggcagtaacgcgttttgggtggggccgtttggcacctatagagtgcgggtatataacgacggtccagtaccgaaagtctattcaggcacggtcagatacggtcgctgaaaccgaagggatgcagcgtgccaagtgatcttcggcacactgcatccgtcaactctgaaatcagacgcgctcgtccaccgacaatttatcgtttgaagaattggcaaagtaggacagggcagcgagcgcatgattagcggttaccagccctttcataaaatccgatgccccttcctgacgcgctatgtagggattgcttttgaacaagtcaatatacccctccaacttttcgttgaataaggcaattgcattgaatttaacatgggtgtctgctgggaaaccgtacgcatcaactgctccgctcccttccacaaatagccaaaaagcacgtgaatcaatgagacctttacgataaagctggcttccgattttcttgaggtcgtcactgctgatcgatgtcatgtcatagtccttcagggcgttcttcaactcgctgatgtcctcctgctgcacaagttttaaagtttctgtagcctccgcttcttcggtgatggtgaattgattgacaacttgcccagggtttttgatggggtgggctggagtggccattgaattcggtacttggcttgtcgttggtaaagtgaccatgaacagtcctctgttaatcgggcctacatctggttgtcgacaagttggtgagtttcttaagtgctgaaattgttacgtttgaggttggcgttatcgccagatttaggcggtggcgtgggcttctgccggcagggcgtgatattaggaattttcacgcgttggactacttcgagatctgacagaacggtctttcatgtttttgggaagtggccggctttcctcttgcgatcattcaggcatagttaatagcacgcagcctactgaagggttcgatctatgtgcagcatgtcaccgtgacgaccggtgcgtactgccaaatcgagggcgatatatgaaaaaacaaaaagattgctgatgagtgttcgcaaaaacttaataggattaacacttgaggtgaaaatcatgaaaagttttctcgcattaccttatttagtgctgatgttgatgtctgctcaggcgtcggctttgtgtttgactcttacggatagctacagcggaataattcagcctgactccagggcggtagcactgggtccgttcaccatctcgggagctaacggctgctcgaacgcaaatatcgacgcaatggtatctgcagcaggcggaggtagaccgcctcagatatacatcgagcagcaggtgggaggggcttggaaaaccgtggccggtaaccctttgtcagcctacgcctcatggctcgggtcattggggacctatcgggtgatattggataaccccgaagcggtctccaagtcgtattggggaacggtcagatttggccggtaatgccctgatagaaccgggtgccaagggttcggttggcacccggtgtcgaaagaacccgcttcaagcacgttcctctatagaaagatcacttcgggaggagttaacaaaaaacgccagcgcattgatagcgtgattggcggcaaacatcccttgaatgtattcagggatgccttgcgagcgctgcacgtcaggacgcccctcaacaaatgacaggtaatcctcaaggacttcatcgaacaaagcgattgcgttgtactttacatcggtttcagcgggctggccgttttcatcaaaggcgccgaggcctgttatgaacatacgaaagccctggccatcaatgacgccactttcataaagccgccttccaacgacttttagctcattggtggtaatagacgtcatatcgtaatctttcaaaaacgctttcagatcatcaatcgactgttgattacccagtttcaacgtgtccgacgctttcgacgcgtctgttatcgtgaatttattcaccacctgttccgggtgctttatctgaaacggattagacgccttcgtgtgcctcatttgctccgcagtcaacaaaacggccatagtgaaattctccatcagccgaaagctacatctttgtatcgaccttccttgaacccactttaaaaaaagccccgtgaccgaatggaccacggggcaaaaaattggctggatgcgaccaaccaaaggagctctttacctcacttggcgctggcgaccaccgtgtccggctgccagccaccgcccaacgctttgtagatcgcgacgatgccgcgatacaggtccacttcggcctgggcctgggagtcttcggcggccaggcgctcacgttgcgcgtccagcagcaccaggaagtccacggtgccttcgcggtagcggatcgcggccaggtcggcggcggcacggctggattcgctttggcggatcagcgaaaccaggcgttgctgacgcttgccgtagtcactgaaggcgttctcggactcttccaacgccagcagcacttgctgctcgtaggtcgccagggcgccatccgcttcggcatcggcgccgcgcaaacgggcgcgcacgctgcccaggtcgaaggcggcccaggtgatgctcgggccgagggcccaggcattcgcggcggacgagccgatctgggaaccgcgcccggcggtaaagccgaggaagccgctgaggctgacccgtgggaacaggtcggccttggccacgccgatacgcgcagtggcggcggccagtttgcgttcggcgctgaggatgtccgggcgacgttgcagcagttgcccggggtcgccaatcggcaaggccttggcaattgccggcaagtctttggggctcaggtcgacgctgagcttgtcggggcgctggccgaggagggtagcgatacggttacgctcgcgcacttgttcggcttgcagttgcggcacgctggcttcaaccgctgcgaggcgtgcgtcggcacgctccacgtcgagttgatcgcccacaccggcatcgcgcaggctgacggtgatggtgcgcgattcctgctggttcttcaggttgtccagggcgatgcgttcacgcagttgcgcgccacgcaattggccgtaggcgtccaccagttcggcgatcattgtcacttgcagctggtacaagtccgcctcggcagcctgctggtcagcgtcggtggcttccagattgcgctggatgcgaccgaacaggtccagttcccaggccatgtccaggcctaggtcgtaacgctcggtcttgacccggctggtggtctggcccggaatctggcctttgccctgatcactgctgactcggctggtgatggtcggcatcgcgtcgttgctggcgtcatcacggatcgcccgcgccgcccgcaggcgggcaaaggcgacgcgcaggtcacggttgccttgcagcgattgcgtcaccaactggttgagggtcgggtcgtcgaactgctgccaccagatgccttcgaacttggcatggtcatattgcttggcatcggcagcggccgtgatgttggccgcctccggggtctgggtcttgtagtcggggcctacggcacaggcgctcagcgccagtaccagcaagctcggcaggaatactttcacactcattgctgtgtctccagcttcaaggccttggccgctttgcgtgcctcgctgcgctccaccgagcgacggatcagtacgtagaacactggcgtcagcaacagaccgaagaaggtcacaccgatcatcccggagaacaccgccacgcccatggcatgccgcatctcggcaccggcgccgctggacaacaccagtggcactacacccatgatgaaggcgaacgaagtcatcaggatcggccgcagacgcagacggcaggcttccagcaccgcagcgagcgggtcgaggccttctgcctgtttgtccttggcgaactcgacgatgaggatcgcgttcttgcacgccaggcccaccagtacgatcaagccgatctgggtgaagatgttgttgtcaccgcccgagataatcaccccggtaatcgccgacagcagggtcatcggtacgatcaggatcaccgccaacggcaggctccagctttcgtattgggcggccagtaccaggaacgccagcagtacgcagagcgggaacacgaacagcgcagtgttgcccgagaggatttgctgatacgtcaggtcggtccactcgtaggtcatgccgttgggcagttcgtctttcagcagtttctcgatcgccgcctgagcctggcccgagctgtagcccggagcagcgttgccgttgatttcagcagtgataaagccgttgtagtgcatcacgcggtccgggcccgaggtgtcgctgaccttgatgaaggtcgccagcgggatcatctcgcctttgttgttgcgcactttcagctgaccgatctggtcttcatccaggcggaactgttgctcggcctgcacgttgacctggtaggtccggccaaagcggttgaagtcgttggcatacaacgaacccaggtagatctgcagggtatcgaagatgtcgctgatcgccacgccgtgggtcttggccttttcacggtcgatggcggcatcgacctggggcacgttgaccgtgtagctggtgaacaggccgaacagttccggcgtggtacggctcttggtgatgatgttctgcacttctttgtacagctcgtcgtaccccaggttgccccggtcttcgatctgcaggcggaagccgccgatcgtacccaggccctgtaccggcggcggtgggaagatcgccatgtaggcttcctggatgctgctgtacttgccgttcaaggcaccggcaatcgcgccggcggacatgctcgggtctttacgctcgtcgaacggtttcaaggtcacgaacacgatgccgctgttcgggctgttggtgaaaccgttgatcgacaggcccgggaacgccacggcggcttccacacctggttgtttcagggcgatgtcggacatgcgcttgatcacgtcttcggtgcggtccaggctcgccgcgtccggcaattgagcgaaggctaccaggtattgcttgtcctgggccggtacgaaaccggtcggcgtgtgggcaaagcccagccaggtcaggaccatcaggccggcgtacaggaacagcgcaataccactgccacggatcacccggcgcacggtgccgacgtaaccatggctggccttgtcgaagaagcggttgaacggtttgaacaaccagccacccagcagcttgtcgaggaacttggagaagccatccttcggcgcgttgtggcttttgagcagcaccgccgccagggcaggggacaaggttagggagttgaaggccgaaatcaccgtcgagatcgcaatggtcaaggcgaactgcttgtagaactgcccggtcaagccgctgatgaacgcagctggcacgaacaccgcacacagcaccaacgcggtggcgatgatcgggccggtcacttcgctcatggctttttcagtggccgggaaggggtccaggcccagctcgatgttccgttcgacgttttccaccaccacgatggcgtcatccaccacgataccgatggccaataccaggccgaacaacgacagcgcgttgagcgagaaaccgaacaggtgcattaccgcaaacgtaccgatcaacgataccggcaccgccaccaacggaatgatcgaggcgcgccaggtctgcaggaacaggatcaccaccagcacaaccaggatcagcgcttcgaacagggtgtgtaccaccgcttcgatggagccgcgcacgaagatggtcgggtcatagacgatgctgtagtccatgccttgcgggaagctctttttcagctcttccatcttgccgcgcacttcgttggagatctcgatggcgttggagccagggcgctggaagatcgggatggccacggccggctggttgttgagcaacgagcgcagggcgtattggctggaacccagctccacccgagcgatgtctttcaaacgcgtgatttcaccgttggcgccggagcgaatgatgatgttctcgaactcttcctcggtcaccaggcgaccctgggtgttcaccgacaactggaacgcggtggcggtcggggcgggttgcgcacccagtgcaccggcggccacttgacggttctgctcgcggatcgcggtcaccacatcagtggcggtcaggttgcgcgaagcggttttgttcgggtccagccatacgcgcagggagtagtcgcccatgccgaacagctgcacatcacccacaccgccgaggcgcgccaactcatccttcacgttgagcaaggcgtagttggacaggtagagcatgtcgtagcgctgatccggggaggtcaagtgcaccaccatggtcaggtcgggggaggccttgtccacggtaataccgatgcgcgtcacttcttcaggcagtttcggctgagtccgggtcacacggttttgcacttgcacctgcgcgttgtccaggtcggtgcccagggcgaaggtgatggtcagggtcagcttgccgtcggcggtcgactgcgaggacatgtacagcatgttctcgacgccggtgatcgcctgctccagaggagcggccacggtttcaccgatgaccttggggttggcgcccgggaagttggcgcgcaccaccacggtcggcggcaccacttccgggtattcactgatcggcaattggaacagcgagatcgcaccggcgatcaggatcagcagcgagagcaccgctgcgaagatcggccgcgaaatgaagaacttggaaaaattcatcttgagtcgtttcccttaaccgcgtggagccgcgacggctgcgagcttgggcgcggttttttccggcgccacttgctccaggttgctggcttcaagcgcttgtcgttgttgggccaaggcggcgagggtttccttgctggccatcggaatggtttccggggcgaccggcgaccctgggcgcacgcgctgcaggcccttgacgataatggtgtcgtccttgttcaggccgctgcgcacgatgcgcaaaccttcgatcttcggccccagttccaccgagcggtaggccggcttgtcgccttccatcaccagcacgaacttcttgcccaggtcggtgccgacggcttcgtcgttgatcagcacggcagagtaggtgccgctgccgaccagcttcagccgggcgtacaggccaggggtgtattcgcccttgctgttatcgaacacggcgcggccacggatggtgccggtggccgggttgacctggttgtcgacaaagttcatctggcccaggtgcgggttgccggtctcgttggacaggcccaggtaaaccggggtggtcgcaccacgacggccttggcgggccagttcggtgtacttgaggaacacgcgctcatcggcgtcgaagtaggcgtagaccttgtcggtggacaccacgctggtcagtgcggtgacatcggcggtgaccaggttgccggcggtgatttcggcacggctgacgcggccgctgatcggcgacgtcacgcgggtgaagctcaggttcagcttggccaggtccaactgcgcctggatcccggcgacggcggcgcgggcttcctgggcggcggtggtgcgcgagtcggccagttcggcggagatcgcattgctctggcgcaggcgttcgccacgttgcgcttcattatcgctgcgggtcgcggcggcacgggtttgttgcagttgggcttcaaggcgacgcacttcggcctggaacggacgcgggtcgatctggaacagcaggtcgcctttctttaccaaggcaccttcggtgaaggccacttggtcgatctggccggacacgcgaggacggatctgcacggtttccggggcttccaggcgaccggtgaattcatcccactcgttgaccggttgttccagcaccttggccacgctgactttggcagctggcatggcggccgcttgttccggggttttgccgcacgcgctcaacaccactaccgccaaaatggccaaggggaagcgcaaatgtttgagtgactgttccatgaggtgcatccgccaatgtatttgagatgggcggatcatgcgcggcgctgtgctatgtcacgaatcgaatgaagcaaaggtaactatcattcggaatgatataagcgcgagattagccctctagcatgggggtttcgttagtgggctatcaataggcgtgatgacaattgtcttttgcaggccgtgcaactcaccggcgtagcgttttgagtgcgtccaactgtgttgatcaagcggattgcggcccaattgtcgagccatgatgcgcaggtggtctcagggtggtattggacgctggagggcagggtgcttgtgatgcagtgtgcgaccacggcagaattcagcggctgcgccatcgcaagaccgcgcattcaatgttgttgcaatctgaccaggaagtcgttgatgaccacgttccagaaccatgactgtcataccgttgcaacgctcggcggcgagttggcagcctttctttccaagaccctcggtgacatttgcgaacggatgacccggactcgcgcacagatcagtgagatcgatgctctggaactgcgtgatggtgacgcagaacgagatgcggcgttgttgaagacccggttgcgcatggaggacagccagcgtcgttacaatgcgcacaaaaaagagggctacggactgggatgggtgctgagccccttcgataccggagaggccaatagccaattcaaaaacgccgtggccaggcatgcagcggtcacccgtgactatgatgagcccaacgccaaggtgcagcgtgacagcgatatagcttcacacaatcagttcgtcaccgataagcgcaaagaacaagctgagctgaaggtcaagctgcagaaactcactcacgttcatcaagaactgaatggttttctccacgaggcgaacgaagccttggctgccgcgtgcggtcaaggttggttggcagccgatttcgccatgcacctcgccgggatggacagggcgatacgtcaaggcaatgtgtcgctggctcgcgggcatctgacgcaattagtctttcagaaacgcccggatgacgccctctactcccgtttgcacaaccaggccctggagctgcgcaagcacgcctattccgcccattacggggtgcctgtcacgggctgtttcgccgatatcgttgacgcctccgtccagttggcagccgccaatctgacggcagattgtgcaagtcaattgctaggcgacctgcacagctcggatcaatggcaattgttgaccacgttggtcgcgtcgcctcaaaacctgcgcattgatgtgctgtggtccatctattgggggatgttccgctgccaacagaaaatggcggatgtgctcaaccgtacggtgtcaaccgaagaccccctgaatggccggttcagtcagtgtgttgaagatgggctttcggagtgggcgtccagccatattccgctattcggctatcctgtgtcccagtcttatctgggtatgttgcagttggccaatactgaagaagaaacccgtgtgggcgccgatatcggcgtgattatcgccctgaatattggtgggctggtctgtcgcaaagcagtgttgttgcaagccaagcgcgcaaaagactgggaggctgacgtaggcagcaagaagggccaattacccaagctttccaagttgccacgcggcgggtattacctgttctatcacgaatcgccccaactgcggttggactcgccggttccaacagtgagttcagcgcaggcgctgcagcagttgatactcgatgcaaacagaaacccgaatgcgaccaagcttaagctggatgttcgcagcacgggttgggactgggccagcttcatcagctttggtctgtgtgatgcagcctccggcattggagagccctttgacaccgttgatgacgccatgcggattctaggcagtggtgagaccggagagcttcctcggcacctgttactgctggcgattgaagacgagcccttcacgcttgaactgacgaagcgcttgcgtaatcaataccagcgggcggagccccaacaggacagatcaatgagcaaaacctcaaaaaaggactacggcagggagggcgctgacttcgagctgtgatggttcgagcaggccatggcgaaggggctgccaggtcgatcaccaaatctttaatcatagcggctgagcgtttcagcccgaacgtaggtgccaaacacgtgatcccataacggtgaagagacaccaaagttcttctcgataccttggcggtggtgcagctcatgattggccaccaggcctggaatgaagcgatacgcccaatgctcggggcgatgcatcacgtaatgtaccgagatgtaatagaagtacccgctcacggcgccaacaaatgtcgacgtcaatccggtgaaccaggccagcagcaacagcgcggcaaaggtcgagctagttttccagctcgacacaccgatataggccagcacgtcgacgtggtgggtccagtgctcacggcgatacagcgagtgaaacaggaagcggtgcgccgagtactccaccagtgaccaggccaacaggcctgcgagtgccagtcccggatcaaaaggtgcgaggtacagggcaaggaggatgaagagggggacggtgaagaagtcgaggtaataagcgactgacgacatcagccatttattggaagcagccatgcgcggaatatccctgtagtgcccgacggtcgggggcgcgattctcggggatcgcgccgtcgccgacaactgtttcgcgcggcactgcgacacaggtctcacgctgcgcttgcaatgacctgccggccagggatagccgcaatcaattcccgcgtgtactcactggccggccgatggaagatctgctccaccgagccctgttcaatcacccggccgttgcgcaacaccagcgcctcatgggcgaagttggccaccaccgacaagtcgtgggacaccagcacataggcaatgcccatctcccgttgcagctcttccagcagctcaaggatgcgcgcctgcaccgacacatcgagcgcgctgaccggctcgtcgagtaacaacaagtcaggttgcaacgccagcgccctggcgatggcgacgcgttggcactgaccgccagacaactctcgcggtaaacgatccaggtagctgaccggcaaatgcacgcggctgatcaactgccgcgccgcgtgctccagcgcggcgcccttgagccgcccgaaggacaccagcggttcgacgatgctgtcgaacacggtaaagcgtgggtccagggcggcaaacggattctgctgcaccagttgcaggcgttggcgcagcgggcggaagtcgcgccagctcaggtgggtgacgtcctgttgttcgaaccagacctggccctgggtcggtttttccaggccgagggcgatgcgcagcgcggtgctcttgcccgagccggactcaccgacgatggccagggtctggccgggatacacctgcaggctgagatcctcaagggccacgaacgttgattcttcacccttgaccctgggcattacaaacgtcttgccgacgtttttcaggctcaggatcggttgttgtgtcgaatccatgcgcggcaagggttcacgccgtctggcgaacgccggcgcggcggcaatcagcgcgcgggtgtagtcgtgttgcggcgcgccgaggatctggcctggcgcgccttgttcgaccacttcaccgtgttgcatcaccaggatccggtcggcgcggtcggcggccacgcccaggtcatgggtgatgatcagcagcgaaatcccgcgctcgctgaccaagcgttgcaagtggtcgaggatcttgcgctgcaccgttacatccagggcgctggtgggttcgtcggcgatgatcaagcgcgggttgcccgccagggcgatggcgatcagcacacgctggcgcatgccgccggagagttcatgggggtactggcgggcgcgcagtacaggcttgtcgatgcccacctgttgcagcagttcgacaatgtcggcatcgacgccggggtagcgtttgcccttggccaggatcagcgcctcggcgatctgctggcccacgcgcagggtcgggttgaggctgaccatcgggtcctggggcaccaggccgatggtgcggccgcgcaatgcacgcttttggcgctcactggcgtgggtcaggtcgtggccgtctacccacagctggccggcggtgacctgcgcactgtccggtaacagaccgaggatagcgttggccagggtcgatttaccggagccggactcaccgacaatcgccacggtctcgccctgggcgatgctcagtgacaggcgattgaccgccgtgttgccgtgccgatagctgacgctgagttggcgtacatccactaaagcgctcatcgctggatctcctcgaaggtgcgggcgatatggttgaggctgaacaccacggccaccaggaacaggccgggcagcagggaaacccagggagcggtgatcaggaagtgtcgcccgttggcgatcaaggtgccccattccgcagccggtggtgcggcgccgaaaccgaggaagctcagcccggcggtggccaggatcgcggcgccgaagtccagggtcgccagcacggccaccggcccccatgcattgggcaggatgtgccgcagcaaggtgcgcccccagctggcaccgcccaggcgcgcggcctcgacgtagggcagggtcttgacccgcagcacctcggcgcgggtggtgcgggcaaaccccggaataatgccaatgcccacggcaatcgccaccggcaccgtgccgaagccgatggccgtgacaatcgccagggccagcagcaggccgggcagggccagcagtacatcgacaaagcgcatgatcaccgcgtcgatgcgccccccggcaaaacccgacaggatgcccaggcccagcccgcccaagagggcgatgcccaccgcaagaaacgctgccaggaccgataggctggcgccatggaccacccgcgtatagaggtcgcggcccagctcatcggtaccaaaccagtggatcaggttgggcgcgcgcagcttgtcgacgggcgaggtggcgtaaggatcgaagctgctcaacacgtgcggcgccacagccgccaccaaggcaaacaccaccaccagcagcgccaggctgaaccccggtcggcgtaacagtggcaacactgtcgccgtcacgcgttgcaggcggctgcggcggcgccacagcgcagggctggccgggagggtattgcggcccaggttctgctcaagaacggtcatggtctaggacacctttggcgtgtgggagatgcgcgggtcgaaccacgggtacaacaggtcgaccagcaggttcaccaatacaaatgccgccgccgacaccgaaacgatggcgagcaccactggaatgtcctggcgcagcactgcttcttgggccagccggccaatgccggagcgggcaaagatggtttccaccaacaccgcgcccgacaccgtattgcccacctgcaagccgatcagggtgaggatcggcagcgcggcattcttgaagccatggcgtgcctgcacctggccacggctcaggcccttggcgtacgcagtggtgatataggactctgtccagaccccctggaaactgcgttgcagcacctgggcgtacaccgctgcactcggaatcgccaaggtcacggcgggcaacaccaggctttccaggccccggctgccggtggccgggaaccagccgaggccgaaggcaaacacctggatcagcagcagccccatccagaacaccggcaccgaaaaccccaatgacggcagccgtgccaaggctttcttcagcggttgccaacggatgtaggcggtcaggtaggccaggccgattccgccaagcagtgacaacacgatggccagccccgccagggacagggtctgcggcaggcgttcggcaagcagttcggccactgggcgattcagtgaaagcgactgcccgaaatccccccgtagcgctcccagcagcaggtcgaaatactgctcgaacaggcctttatccaggccgtagtaggcccgtgccttggccaggtcctccgcggacagcgcgtcggcctccatgcctgacgcgctgagcatgatcgacaaggtgtcgcccggcagcagatacagaatgaaatacgtgatgctgtacgccccccacagcaccagcagtgcctggccgatacggccgatcagataacggctcatggcgtgccgatctcaatatcacccagcagcgcaaaaccctcggcggtccagcggaagttttttaccttgggcgaggtcgccgcctgccacacacgctcatacaccgggaacgcggagctttcatcgataagtaaatcctgcaggctgccataggcggcagcgcgttgcggggcttgagtggccgtgatgccggcatcgaacaagcccttggcctgttccagcaccgccggttcataggtgttggtggccagcgtggaactgttggcgctgcgcggatcgaggatggtctgcaggatgatcgggtcggcgcgggtcatgtagttgatggtcaggtcatagttgcccgccgagttgttggcgacccattcggcgcgggtcactacgctgagtttcaactcgatgccgaccttgcgcagttggtcctggatcagcacatcgccggcggtctcggccggggtgatgttgtagctcaggctcaggcgcttgccgttcttctgccggtaaccgtccgcacccttggcccagccggcttgatccaacaaccgctcggcgtccgccgggtcataggccagcttggcgccctggcttttgaagtacggcgtggtcacatcgaagatgccgtccaccaccgggaactcggcgttgtacacggtgctggcgtagctcttgcggtccagggccttttgcagcgccaggcgtacttgccgatcggccaggatccgctcgccacgggtgttggggtacaggttcagcgccggtcccggcagcgagcggctttgaatggtcgcgcccttggactggaacagcttcaggtcgacttccgagaacgggttgcgcggccacaggatgtcggccttgccttgcaggaacaggccgttgcgcacgctttcttcggggatgtagctgatgtccaccgcgtccaggtgcgcttcaccctggtttttcatattggccgaggcccaggcgtagcccttgcgcttggtcaggtgcgcaccgacttccggcgtgtagctggccagtacgaacggcccggtgccgatgatcttgcccagggagcgctccttcacgctcagcgcgtaggaggccggcgcgaggatcgccaggttggtggtggaggtggcttgcaggaagcccgcgttgggcttggccagcaccagcttgacggtgaagtcgtcgaccacttcggcgtggtcataacccgccaggtaggtggcgccgaaggtggccggcagttcggtggccagtgccttgtcgctgtcaaacgcggttttcaccgccttggcatcgaagcgttcgccgttgctgaaggtcacgtcctcccgcaggtggaaggtataggtcagcgcgtcgtcactgacttcccagcgtttggccagccagggaatgatcttgccggtgtccgggtcctggtcggtcagggactcggcgacgttgcgcagcagcacgcggtgctccagccaatagacctggaacgggtcgacgctgaccagggtggtgttatcgccgaaaaatgcgatgttcagggtcttgcccgcctgtggggcatgcccgggcgagcaggcggcgaggctcagcgccagggcgcagggggccagcagacggctcatcaagttggcggtattcaatggggtgccctcatgtggcgtgtggatcagaagtcgtaggcgagcttggtgtaccagtagccaccgcctgggtagaacggcgggttgccgtaggcggccaggccgaggttgctgtacaccgcgtttttgtcggggcgcacgtcgaagatgttggtgccgccgatgctcacggtgaggtggtcgatgaaggtgtagctgacgtccaggtcggtgatccatttggcgccgaagctgcggtcgccggtggggttgacggccagggtcttgaccgcgccgtagcgcgcggtttgcaggttgacggccaggtcctcgaccttccagttggcgcccaggatccacttggtcttgggtgacgcgtcggtcaggtcgccttcgcggtcgcggccgaccagggtcacgccggaaccggccagtgccgccggtgtgtcgcgtgtgccttcaatcgtggtcttgttccagttgaagcccaggctccagcgcacatcgccccaggcctccagcggtgtggtgtggtcggcgaccacgtccaggcccttggtgcgcgtgtcgaaggcgttggtgtagtagttgacccaggtgccggtcggtacaccctgggcggcgagaatggcgttgatcgcgccgttgccacggtcgtagatattgctggtgagggcgatgcggtcatcgatgtcgatcaggtaggcatccgcggtgatgctggtgcgcggcgccggttgccaggtcaggcccagccccaggttgcgcgatttttccggttttaggtcatcgccgcccagcgccttggccaggttgctgccggacggcgtcaggcgcgtcacggccggcaccacgttgccgttcacatcgacggccacgcggttgtcggccacggtgtagccgatctgggtcagggaaggcgcgcggaaaccggtgcccagggtaccgcgcacggctacggtgtcggtgagttcgtagcgtgagttcactttcaggccgaaggtgttgcccgaatcatcgtcgtagtgctcgacccgcccggcgacgtcgagaaaccagcggtccgtcaggtcgaaacccaggtccaggtagccggcgtagttattgcggatcaggctgacttcatcttccggacgaatcgtcaccgccgcctgtgcgccagacgcggcagggtaggtaccggtgatataggcctcgcgctcgccggcgaacgtactgaaatgctcccagcgatgttccaggcctgcggatacctgcaccggcggcgtcaggttgaacaggctgtcgtagcggcgggtgaagtcgaggttgttgacccactgctcgaagcggaaggtcgccaggttatcgaacctggtcggcgacgcggtgcccagcgacgggttgatattcaggtcgctggagtggtgcacgttgttgcgcccgtaggtggtgctcaggtcccagttccagtcggccaccaggcccttgccgccgaacagcaactggtagtcgcggtccttgatgttgttgagtgggaagtaaccgtcgggaaacacctcgggcactgcggcggtgccggtcggcaggcggaagtagttggcggcctcggcgtcgcgttcgccgtaggtggagaacgaatatagtgtcaggtcttccagcggcagttcggcgttgtaggccaggttgaaggccttgaggtccgggtcgccgttcttgatcgccacgcggtcccaggccgcttccttggccgggtcggcaaacgcccgcacgctgctgtcggccttgtcgttccacgacgcgctgccacgtttgcgcgcatcggccgagaagtgaaagaagccgccctggcccagttcgaagccctggtcacccgcgaccttgatggtctcgccctggccggaatacaactgaccgtagctggtctccaggtggccgccgcttttcccggacttgaggatgatgttgatcacgcctgcgactgcatcggaaccgtactgtgcagccgcgctgtctttgagcacctcgatatggtccaccgcgctgaccgggatcaggtcgatgtccaccgcattcgcaccgctgttatcgatggaaccgcgctggccggtggcgccgttatgccggcgtttaccgttgaccagcaccagggtgtaggccggtcccaggctgcggttgctcagcgggcgcgtcaccgagttgtagccggcgatgttggtgccgaagttgaaagaaggcagcagcttggcaatcgcctcggacaactcggcgcgcccggtcttgagcaattggtcgctgttgatcacatcgatcggcgccgggctgtcggccactgtgcgttgctggccacgcaggccggtggaaatcacggtgacggtatcgagcgtggcatcgtcggcgaaggcgggcgcagcggccaggagcagggagccggtcagcagcgaaagaggcaacttcttgagggacgtggggagtgcgatgtctggcatggagataacctggagggtgggggtgcgtcctccgccaggtatggggtcggtctgtgaagtgaagatatctctataaaaaacggtcgggaaagtcttttttggaataagctaattatcagttaatattatttatatctaaaataagattaactatttttattatgaaaaacaggcgtgctgcttatcgcccatgtcgactacattccaaggggtgcttggcggctatcgcgactattggactccaggcccatcactgccgcctggcatacagaagaatttggcgcgaggcaaacctctacctcatttatgaggtgctcgagggggctttcgattagggcgccgaagcctgacggtgggggcaccgcaccggcgcactcggatgatgactcaggctcgacgctttccagccatcaggcctgcaccgcagggcctttcaactcgatctgattatcatcagggtcattgagatacatcgacaacccggttccctccgcgccataccgcatcacggccgcttcagcggataccccggccgccgccaggtgctggagaatggcctgttcatcgaacggctcgacccgcaggcaaacgtgatcgacattgtgtctttgcttgcccgccggctgcccaccctgacgcccgatcggtccgttcacatcaaccaggtcaatcatggatgtgccagcactcaggtgaatcatgccgaggtcatcacggcgttttttgacatcacaccccagcacggatgtgtagaacgccaggctgcgctcaatgtccttgacccgcaaaacaacatgatcgatacgttgaagggtaaaactgcgcatttccatcactcctgatgcttgccgttgtcgaatgggacattgttcagggtagccgcagtttgagtgcactcaaggctggcagggtcgaaggccggatattcaaatggccgcaataggctagaggcagataacatgaaagagtggtcgtcgctgcgcaagtcgaaggtggggggtgtcgttgatctacgggaacaacgcgtgctcgccatggacgacggcgcgtacaagatttcagataatcaatattttttagctgacgcctgttctgttgagggagaggaaaaactgagtttgctatccctctactgggccagcagtgaggctgcatttcgaagggcctactacagggatgttgaaaatgatgacctggctgtatgccaaccgccggctgaattacttccagctggggcgggtgcgacctaccgtcagataaaagaggcgcttggcgctcttggttctgacaggttaatggagtacgcctcttatcgtgttatgtctgacggtgcatttgttcataagggcttggaaagcgcatcggctgtttattattttcggtcgcatgacattgctcatgatgagatgccttacgcgatactgtggaagcttttcagtgtttgattaatgaacgtcagggccctgcggtcaggttgaagtggtcgtacgcgactcccgaaagtcgacatttgcagtccccggttggtgtttcaacgaaggtgtatgcagagcagtatgtcggccctgggattgctacggcagtgccattgctgcactctcactgctcatttttgtacggggtaacgcatggactggagtgatgtgcgggtctttctcgcgattgcccgtagcgggtcgttgggcgctgccgccaagcagttgggtgtcagccatccgaccgtagggcgacgcttgcaggtgcttgagcagtccagtggccagcccattttcctgcgtaccacccaaggtctggtcctgaccgacagcggggaaaagctgctcagtctggcgcaggaaatggaacaaagtgccttggcaatcgaaaggcgccttgcgggggacagcgcacagccagaaggtgtgttgcgcatttcttgcgccgactggttcgcctgttatgtgctggccccggtcctgaacgaactggggcgacgttatccgctgatcgtgcccgaggtcatcgcagggcatcgattgtttgacctggctcgtcgcgacgccgacattgcctttcggatcgttcctttcactgaacccgatattgtccaccgcaaactgactaccttgagctacgggttatacgcggccgtcggatccgctgaccccgagccgcagggcgacggggtgggtttgatcaccatgagtgttgcccagtctcactatcccgatgtgcaatggctgcagcagcgttaccctctggcccgtaaggtgttcaccagtagcagccgcacagcccaggcgcacatgtgcgcgcaagggcagggtgtcgccgtattgccccgcgtcctgggcgaccagttgacggcgctgcggctgattgatccgcatgaaccgccaccgggtcgcgacatctggatgggttaccaccaggacatgcggcagatggacagtcttcgtgcccttgccgaccttgcctcgggcatgattggctcgcagcagggccgatgattcactctactgggcgcagggctgccgtttgcaattgcacagccggttggcgcgccaggcttaggctgagtcccgcgcccaaggccaggcatgccgcgatgcagagtatggaaacggtgaaggcgtgagtgatggcggccgcgtccgtatccgtgcccagaagggtgtagaaaatgccgcctattatcgccacgctcagtgatgtgctgatttgcagggtagaactggcaatgcccgcaatcatgccggaatacgcgggcgccacgcgtcctgtgatcattcgcatcaatgtcggcagggccagtccttgtccgaaaccgatcagaaacagaatgacggcgaggggctgcgcagggggcgtgacggccatcggtgtgtgcgccacgagccaggccaggagcacgaaccccagcacctcaagccccattccgacggggttcacgtaagcccccaggaaacgcctgaattgaggggtggaaagcgggccgagcaaaaatcccgcgccaaaaggaaggaagatcaggcctgcattgagtgggctcgtatgcagcgctccctgtaaatacatggaaaacagcaggaaaaacacgccgatcgcgtagaaggtcagggcaacgagcagtgcccggcccaacccaggcgtgcgcagcgcggcaggatcaagcaacggtgcgccttgcgcctggtgcaaacgggcttcgtagcgccagaacagccagcccaacagcggtactgccgcaagcgacagccaggcccacaagggccagccggcttcacgcccttcgatcaatggaacgatcagcgccccaagggtcgccatggacaggacggttccacccagatccagcttgcttgtctgttgcgcgcgggtttccctgaccacggcaatggcgatcagaatgaccagcaacgcaatcggtagattaaccagaaatatcgcccgccaccccaagcccatcaagtcgagcgatatcaatatcccgccaagtgcctggccggctaccgacgccagtccaaagaccgcgccatagagactcagcgccaagggcttttcggactcgggaaatatagcctgcgcagaagcgagtgcctggggcgccatgacggctgccgtcacgccttgcagcgaacgtccggcgatcaacacccaaggtgactcggcgacgccgcagatcagtgaggcaactgcgaaaccaaccagcccaaggaaaaacattctcatgcgaccgtagatatcacccagccgtccgccggtaatcagtgtcacggcataaagcgccgcgtatgaggaaatgatcaactgttcggcggaggaggccgtgccgagcgattgctggatcgagggcagcgccacgttcacgatgaaaaaatccagcggcggtaaaaacgcaccgaccaataagatggcgaacatcaaccagcgccgcggttccggtaggacgttttttgtctgtggcataaggtctcctgcctggaacccttcggttccagaatattcacgatggcgggtcatgctccgaatcaatggggcccaatctaaacgatcaaacttgggctgacgcctcacaaaattgaacgcccagcgttcatttatggcagtgccgtcgagtgcctgattcctctcaaaatggccgcactgtggttccagtcggtccacacaaacgagactgaggagtcagatatgtcaggtaaattcgctggtcaggtggcagtggtcaccggcgcatccaccgggatcgggtatgcgattgcgcagggtttgattgcagagggcgccaggcgtgtttacatcactgggcgttctgcagccacgctggaggctgcggtggccaggcttggcgatagagcgatcgcggttatttccgatgtcgcgcgccaggctgatctcgatcagctcaaggcgacgattgaggcccgcaacgatcagttggacgcagtgttcgccaacgcgggtatttgcgaaaagaacccgctgggcgagaccaccgaggcggcgtacttcaacctcttcgacattaacgtgaagggcgtgttttttactgtgcagacgttgatgcctttgttgaaaaacggcgcttcgattgtgctgacggcttctatctgctccagcaatgggatggaaggactgagcctctacaacgcatccaaggctgcagtgcggtccttcgccaggacctgggccaacgaactcaaaggccgcaagatccgaacgaatgtcctgagccctggcttcacccgcacccctttgatggacaacggcttgaagatgagcgaaagcgacattgccgcgctgcgccaccatgtcgagcagatcactccgctggggtacatggcccaacctgaagaaatcgcctcgtcagcgctgttcctcgcatccgccgatgcgaaatatgtcaacggggtggaactgatggtcgacggcgggctgtcgcagatctgacctcccgatcgaacctggtgcaacccttgcagagggttgcttttgtcgcttttgcgaagcccccgcaggacacctcaacatgaacagtgaagaattgaacacccgactggacgccctggaggtcgcgccgccatcgagtcgctgatcagcgcctacgccaatgccttcgatcgcatcgacgtgtcgctcctgagcggaatctggcacgaagagtcgacattggatctgccgggtttcggctcagccggaaatcgtcatgaaatcctggcgatggcgcaaaacagctggcgccagatgccacaaatgcaccactggatggcctacccgatgatcgaaatcaagggtgacagcgcggaggggatggtggctgccgattgcctgttccacgacactgaaaaagggccggtccaagtcagcgggttgtatcacgacaggtttgaacgtcggaacggaaaatggacgttcctgtcacgtcgttttgaactgcatttcctgacaccgttgaacggctgggtacccgtagcgggtgaggagaggtttgcaccaagcgaagatcagaacatgagtaaactcagagaaggttgatttgcggaatgttcaggatgtgacaatcaacttaacgagccaaaatttgccgctgattcggttttgaactcaggggatccagacaagctgcggcgcactgggttagtcggtcatgcaatgttattaaaggttttttttgaagcttgatggggacttcgattacaaactgtcggggtcgccaaaaaacattttgactgggctctagaacagtagtttcagcttggaaaaatagagttatgcccccagttatgcccccaattgcacagggtgtgcgagtgatcgcaaatggcgatctccgacggacttcgctattcctggccagttaagccgttgggccaggtcgctgatcagtcgttaggcaagtgcaactgcacttccatggcgtcatgaaggagtctgacgacatcgatcacgtcgtcgtttgtcacacgatagaacacgatatggcgtgggcttttgaccgttccatgggtttgtttggcctgctggcgtgaatagatgaggtgatagctgcgaaggcccggtgcaagttcatcgcggtcgtggctgccaatgcgataaggcgtgtgggcaagcgcttgcagcgccgcgaggatcagcgcctggtagcgctggcgtgcttgatcgccgaactgcgtctgggagagcctaaggatgtcgacaatgtcggcacgagccgggttggagatccgatactgcggcatgctcagtgtttctctctcgcagggagggttgcctccaggctcaagctctcgaggtagtgctccagatcaccctcgttcacctgagtaaagcgcccgtgctcaagatccatgatgccgatcgaggtcgcctgacgcagtgcctcaattttggcggtgtcttcggcgacgcgctgctccaataaacgtaaaccttctcgcatcacttcgctggcattctgataacggccggactgcaccaagtcatggataacctggtcctggtgaggggtgagcacaacatttcgcgtcgccataactagctccagttctatgcaaacagatacttttgatgttggcatattatgccaatttcgctctggagaatagcttggggccgacatccggcgatcaggtgacggctgacttggcgccaatcagcaaggttcaaagtcatcctcccataatgaaagcaaccggcagattgatttgaagattgatatgcctgactgtgcgtgggaggaggcgcgcgatgtgtgcttctcgatccgccctgaaatcgatcggcatgttcgatgcccatcaatatttgcgtttagaggcaccaagagaggttccaatgccctacgagttagaaaatcgcctagtgatcggcgtcgcttccagcgctgtgtttgatttgctggcatcggacgcagtgtttcagagtcagggggaggaggaataccgcaagtttcagcaaaacaatctgcacgtcccgcttcctaaggggatagcgttccccttcatcaagcgtttactgtcagtgaatgacctgagcgtcgatcctacggatccgctcgtcgaggtgatacttctttcgcgcaatgatcccgacactgggctgcgcgtactgaagactatcgagcattatgggcttgggatgacaagggcgattttcatgcagggaaaatctccttatgaatacataccagcactgaatatcgctttatttttgtcgggtgacaaaaaagacgtggaagcggctatcagggccgggtacccggctggccaggttctcgattcgaaatttgaagacgacgagactgataaaaccctacgcatcgcattcgactttgacggcgtgctcgctggcgatgagtccgaaacaatcatgcaggcctctggattgtctgagttccatgcgcacgaagtgaagaacgttatgcagccccataaccctgggccgctgaaggaattcatggtgcggatatccaaaatccagtcggtcgaggagaagcacaaaaagctcaatcctgaatacgaaaaccgcatacgcgtctcgatcgtcacagcccgcaatgctccgtctcatgagcgtgcgatgaatacactcaagagttggggtgtcatggccaatgacgcattcttcctgggtggcatcgagaaaggcaaaattttaggcgtattgaaaccacacatcttcttcgatgaccaatcagggcaccttaaatcgactagcgcagttgctccatccgtgcacattcctttcggcatcaccaaccatgtcgcgacagtggttgcgctagagcctgaagctgatcaggtccagcaggtgatgtaatacggaggattgagcgcgtaatgctaaaggagtccgtataggttcctcgggcagtccgagatcggatggggtaattaggattgctcgcgaacctgcatccagtcgaaaaaatcttcggatgcaaagccaacgctgcagttggcgtcgaaccgctcgttgattctgatgagcgtcatccgcttagcttcttgtggagaggtcgggaagaaagctccaccaggttcgctgtgcatgaagaaatcgccgagctttgctccgcagttttcgcagtgattcatcaggtagcggctgcctgccgttttgctgtaggcctgcctgaacttgttggtgaagtgatggatctgcttcgtgaccaagggagagaggctggcgacgttggagaccgttccgcgatacccattgcacttccattcgccgaggttgcttgtgagcgcgaaatcttcgtcctcatcctcgtagtaatcgaactcttcgtgttgctcgggcagcttgaacgagaacacgcgggtcaaattagagcagccccagcactcggacacggactctatgacgtagtaatacggtgctcttacactaaattcaggtccgtgctccaagtctgcatgcgttgttacggacagccattgagccaagggggcgatgtcgacaccttccgggatgtaccaagtcttcaggcttgggtcccatctggcaccgagtgatttcgcttcatctttttctgagaaggggactttcagatcaatccttgccatttctgtatccgtacgtattgctcatcagtaagcgcagctttaacctgaagcgactatggaatcttgatacctaaagcattcaacgatggcgtatccatccggccattcacggtcagcccactgtccatctgaaaggccatcaacgcaccacgtgtcgtcttgcccatcactccatcaatggcgccttggtaatactggcgcaccatcagcgcggtctgcacacgggtgaccaggttgcttttctgctcattggtcgcgcggctcttagaagtgctcgaacttgtcccgctggtagtgccagacgactgataaaggctgttgctgcttggggtgctgctcgaagcactcggcgcgctgtagcttcgggtgctggtagcgggtgggctgtagtagcgaggtgcgctatagccacccgagccgctgtagtgagaactgtgcgagctgtgggagctatgtgaactgtgcgagcgatgtgccgcatagatgttcacggcgtctggaacattcagcgtatcggcaaataccggtggttgcagcttgtcggcaggctgccagttcgcatcggcgagcgacatattgcccgcctgtgccagggtggtacctgccatcggcagcagggtgatcccactgatcaggactttccagcggtcaagcaatttcactgtgcactccttgcgtaggcgctaaaggcctcggtcgataggtgtcgtacgccgcggctctgccagcggtcggtgtgggatttgaagaagccggagcaatgtttgacggctgcgcattgctggcagctatcgatgaacaggttcttccagtccgagatgctctgccgggcgaaacgcgagaggtgggccgggatcaggcacaggggcaggttgtagatcgaaaccggcactcctcggttgaacaggaaatacacggcctggctcaacgactcctgatagtccagcgggtcaatccacagatcttcgtagtttttcctggccaggccggtgctttcgatacccatcagcgcaacatgccgcacgaaggacaggttcctgaaaacgtagtgggcgagctctggcaagcgtggcgcggtcaggcgattgagcaccacgcgtatctcgatgatctggttggcgcgcgccaggttgtaaagaccttgcagggtttcgctgaacgcgcctggagcctgcaccacatggtcatggtcctcggcattgtcggcatacaagggtatgccccagctcaactgatggtggccgattgcagagagcgctgcgatccagctcgggtcttggaacagacgcccgttgctgagtacatgaatggatttctgtggcaaaacggctttgcacttggccaggatttccagcaggccgtcgcgataaagcgttggttctccaccgctgattcccagattttcttcgcccgggtccatcaggtcgatcagccggaggttctcctcgatgtgccagcggtcatcgatatcttttggcggctgcgagcacatcaggcagaggctgttgcaacggtcggtcatgaacagcaggttgctgtctgagcctcgtcgatagagcactcgcaccaacgcgttgcctggtgtgatggcaatgacatcgccgggctgcacgacatccgcatctttgggggtgtgcaggtgtggccgcgcgctatcgaagttgccgatcaatggctcagggatcaggaatccacccactggtaatgagagcagatgcgggctccgtagccgttcttcgtttggcagccaaagcaacaggtcaccgagcccagcgcttccggcacaaacagccaagcctttttcgatgaactcatccagagtgatgaccttgagcagtttctgctcattaagatgatggatttcgaaatgggtatctttgcgtagcatcgccatcagcccctgtaacccggaaatcgaacatcgttgtaagagcgcctgttcaaccacgacagcagcaccctttggacgttgtcgtcgccatcgcaaagcaggccgaaaagatgcttcagcagccccatgttctttttgcagaagctgctgaacactcggtgtccgatcgggtcagcttggcgggcatagtgttcgatagggtcggcaccacagtacgggacaagtgcgcagtcggagcagcccggcagcgcctctgctacaccactggcgagcaacgcattcataacgggcgatgcgagtaattcagacaagggttggtgtacggtgccgagcctaaagccttcttcacccatctccagcaacattcgggcttcgtccgacggatagacgtaaccgtcatagttgtaaaccagcgccgcagtgcctgcgccagcaggggagcggaggtctacatagccggaggagaagggtgtcaggatattcttcagcaacaggctcgtataactctctgagaggtatacgcccttttggttgatatgcagcaaataggccagtgccttcttgtagaaggccaggtatcgctcaatagggtaatcaagtcgatgggcactcttggtggcaaacccataagggctcagaggccgaagcgagatgctggagaagccctggcttacatactcatcgatgatcgcttcaggctgttcgaggcttcttgaagtcagcgtggtcaacgcggaaactgcatcatggccaaggcgctcacggacccactggatgccttttacagtgcgctcgtaggagtctcgtgacggggtagggcggttggcattgtgcaagggcgccggcccatcgagcgaggtcgaaaactggatgcgatattcttctgcgaagtcgagtatttcctccgtcagatggtgcagtgtggtggtgatgacgaactggatatcccgttgttcgaccacgttccgttcgacgacccattcgacaatctggcggacgcgctcgaaggccagaagcggctcgccaccctgaaactccacagtcaaggcgggagcgttcgattcgaacagacgattgaccgccgcctgtgcatccgcttccgacagatcgtggccggatcctcccagaggggcccgcgacacctggcagtactggcaggtgtggttgcagcgcaatgtaaccacgaacaagtgcagagcagggccctggaagaggaagtccttgcggctgcgatactgcgcagccatttccgggaacgggtcgtggcggcctggttcatagatgaagtggcgggccagcaggtccttgtaaaaaggcgtacttgcttgaacgtcgaagtaactgagggctcgtaattgcgcgtcgttcacgtgcatgtactcaccggtatcggaggtgagcaggatgtcacggtcatgtcccgtgttcatgcgcatgaatcgaaaaggcagcaagcggtagtgcttggcgtctgtcgcaatcagtgtcactgcgaaaccccacatccagcgagagcggctcgggccaggacctcgcgcaatcctactgtttcgcgattgatatggtcgcgtagggcgaagtcgttcagatgctggaggatcagtgagtgagcctgctccggggaaagcgttagccttgcttcagcggggtgggccgtgagacttatctgattggtttcaataccgacctggatcgcgacagtgtcggcaagggaataagcggcgcgttgcaccacgctgagcgggtaggcttcgctgtcgagtttcagcgtgacaggccatgtcatcggaaccgctccttcaaatccgttggaaacgtgtggattttgcaggttgccgaggcattatgccatcataattttttacatttgcacgcatttgtccagcgtggtgggtggtgcgctcactacggctcggccattgatacgaggtagggccgaggcttcgtatctccctcagtccacccattctcatcaatagcctgcttggcgtcaggctgggggcatccttttcaaaccatccaatgcatgccctcagatatgcccccaatgcagcaatccaccggaagtgagtggaactccatggtttgtggaaaggcagaaatgatcagccgaacagcctgccagacgacgtctaaagactctcagggtcgccaaaaaacattttgacttggctctggaacggtcttttaaggtccgaaaaacttttcgatgcccccattttggcccccacggcgaacatctttattgatcagcggtggctgttcgcgagggcgcttggcggccttgagaatccgggtgcgcgaggttgactcgagcagggatagggttgcgcggtgaattcggtctctgccgcgtcttgcgacttgatatcaacatttcaacgccgaaacaaaatcatacatttaattgacgccatcaaatcgccactctaagatcgccgaaaaaaatagtggcacaaggccacttagagggatctagaaatgtggcgttcggtacgtcggaccaggctttgcctgctgttcgcatttttttgcctgagcacggccgggatggcccaaggcgcaaccccgcagaacacgccaggcgtcaccgacctgatccgtgaccgtcaggatcgcctgctcgaagagcaacagcgccgcctcgaagagctcaaggacctgcccggcaaagccgccgccccagccaagctgacagcgcccgccgacactcgctgtttcgccatcaacaccattgaactcagcggcgccgacgcgctgtccgaaggcgagcgcgccagcctaaccaagccctacatcggccaatgtcttggcgtgccgcagctcaatgatctgctcaaggtcatcaccgaccattacttggccaaaggtctggtcaccagtcgcgcctacctgccgcaacaaaacctcggcagtggcaacctcaaggtacaagtggtggaaggccgcttggagggcatgaagggtgcagagggcagcgggatcactgaccgccagctcgccatgacttttccaggccaaaagggtgaattgctcaacctgcgcgaaatcgagcagatggtcgaccaactgaaccgccttccctcaaaccaggcgcagatggaattggcaccgggcaaacaagtcggcggcagcgaggtgttggtcaagaacaccccgcaaaaaccctggcgtgttggtctatctcgccacaacggcggccaacgcagcaccggcgaacaacagtggggcgccagtctcgattgggataacccgctcggcctggctgaccaactctccctgcgtggcgcacacgacgccgtcagcgatcaccagaaaacctcacgcaactcgatgctcaactacaacctgccgtttggctggtggaacctcaattacagctacagcgagactgaataccgctccctggcccaggccagcggcttcaacttcaagcagtccggtgacagccagagccaccagttgcgcttggagcgagtcgtccaccgcgacgctctgagcaagacctccctcagcaccggcgtggcctacctgcgcaccaacaacttcatcgaagacagcaagctcgccctgagcagcaaccgcctcagcgaagcccagtttggcatcaaccacggccggcgcattggcggttcattcctcaacatcgacctgggcatgcaggacggcattggcgcgttcgacgcccaggccaaccacaacccacgccccggccaggccgatgcgcgctaccgcaaatacaccgcgacggtgagctacctgtaccccttcaagctgtggggcgagtcattcagcttcagcagcctgatgaccggccaacgcagcgaagacgtgctgttcagcccgcaacgcatgagcctgggcgggcagtcctcgattcgtggctacaaggaccaaagcctggccggcgatagcggcggctactggcgcaacgacctgcgctggagccgcccggtgacctgggtgtggctgcagccggcgttcaacgaatacggcaccagcctcggctacgaccaaggcgtgatccgccatggtcgctacaacgccgaacagcatgggcgcatgaccagcaattccctggaactgtttgcacgcggcaagaacgtcgcggccacggtgacctttgcacactctttggaacgaccggacccgatcacggaacgtgaagcgccgatctacttccgcatggatttttttctttaaattcttaccgccctttgggcatcgagatacgacatggatgttcgccagttcgccttcctcgcgcgccaaccgtctgcggccgtaaaaagccgttccaccttcctgggcttgcccaagcgcgggttggcgttggtgctggctaacgccatgttctggcagccgctgctggctcaggcggagggcattgccgtgagcgggccgggtaccacactcgggcaagcgggcaatggcgtaccgatcgtcaatattgccgcgccgaatggcaacgggctgtcgcataacaaattccaggattacaacgttggccagcagggcgtgatcctcaacaacgcgaccggtcggacccagtcgacccagttgggcgggatcatcctcggcaaccagaacctcaacggtatggccgccagcgtgatcctcaatgaggtcaacggcggcagtcccagccagttgcgcggtttcaccgaagtggcagggcagtcggcgcatgtcatcgtggctaacccgtatgggattacctgtaacggctgcgggtttatcaacaccccgcaagccacgttgaccaccggtaaagcggtaatcgaaaacggccagatcagtcgctaccaagtcgatcaaggcagcgtgtccatcgaaggcgcaggcctgaacgccaacaacatcgaccagttcgaaatcatcacccgttcggccaagctcaatgccgagattcaagccaaaaacctgacgatcattgccggtgccaacgacgtcgatgccaagaccctcaaggccaccgcacgtgtggccgacccagcaacagccccgcaactggcgatcgactcttcagccctgggcggcatgtacgccggggcgatcaagctggtcagcagcgaagccggtgtcggggtaaaactcgatggcaagatggctgccagcgcaggcgacatccagatcgacgccaacggcgacctgaccgttgcacaagtcgccgccgacggtgcagtgaacatagaggccgtcagcgccagcattcaagggcccgcctacgccggcaccacactggagatgaaaacccgaggcgacctgaccagccagaacaaccttgtcgccaaggaccgcataaccctcaccagcggcggccagttggtcaacaatggcatcatcgaaagcggagtcaatcccgataacacccgcaacaccaacgccgatatcagcatcagcgcgcagagcctcaacaacgccggcaggaacatcattgccagccgtgacctcgacatcaccaccacccagactctgaacaaccagggcggcaccctcagcggacagcggcagaccaccgtcaccgccggcaccttcgacaaccaaaacagggggcggttgctcagcaccgaccgtctgaccttgaccgccgacaaggccgtgaacggccgggacggtctgatctccagcaacggcgacctggtggtgaacgtcggcgcattgggcaatcgcggtggggaaatctccagcctggccgatgtcaccctgaatgtcgccagcctcgacaatacgtccggcttgatcgcggctgacagggggctcagcctcactgccagcggcgcgatcaataaccgtgacggcaccttgtcggcttcaaccctggcgaccttgaaggccgtcagcctggacaatacccgcgggcagattaccggcgatctgggcttgagcatcgacctcagcggtgccttggataaccatgctgggaccctgggttccggcaaggccttgactctggccgccgccagcctcgacaaccgcgcggcgggcacggtgctggcggcggacggcacgctgagtgccgccgttcacggcgcgctggataaccgcgaacagggcaagctgcgcgccacgggcagcatcgagctgaccaccggcagcctggacaaccgcggcggcagcctggcgggcaaggaccacctgaccctacgcggagggtcggcggacaatcgtggcggcctgatccaggccgacaaagacctcaagctgctggtcgatcaactggacaaccgcgacaagggcaaccttgtcgccaaggcggccgtcagcttcgaaggcacccgcctggacaatagcggtggcctgctcagcgcagtcggcccggtcagtctcaaggccaaggaggttgccaacacccagggccgtattgccagccagggtgacctcgaagccagcatcgacagcctcagccagcagggcggggcgctcgtggcccagggttccatacggctgaccggcaagagcctcgacaaccgcaatggcggcacggtcgccagcacccagggcctgaccgtcaatgtcgagcagatcgacaaccgtaccggcgagctgtccagcacccacagcagcgtcagtgtcagcgggcagcgtttggacaacagcgatggcggcaagctgctgactgagactgatcttggcgtcgcagtggcgcaagtgatcaaccagaaccagggccggctgttcgccaggggcagcgtcaacctgaatggcaagaccctggataacagcggcggcaacatcttcgccctgctgggcctggatatccgcctcgatggtgcgctgctcaacaacaccggctcgctcagcagcgaaggtgcgctgggccttacggtcggcagcctggacaacacggccggcaagctcggcagtgccgccgacctgttgatcgacagtctcggcgcggtgctcaaccagggcgggtcgatcctcacggaccagggcctggtgcttgccagcggcagtctcgacaacagccagaaaggcctgatcagcggcgagggtgcgacccgcgtcaccaccagcaccctggataaccaccagggtggccgccttaccagtggcgaccgccttgacttgacggcaacccaggtcaacaacggcgcttccgggcgtattgccagtgccaaggatctgacggccaacgtcaccgtcctcgaccaacagggcggcgaactgttcagcaagacccaactgaacctggacctgcacaacggccgcctggacaacagtggcggcctgatcaacggcccgctgctggtgctgaagaacctcgacgtggtcgtcaaccagggcggtgaaatctccagtgcccaagcctttgccctgaccgcgaaaagcctcgacaacagcaacggcaagctgctgagcaaccagggcctgaccctgcgtatcgatcaggcgctgggcaacatcaagggcctggtggccgcggcttctctcgacagtcgtagcgccagcctggacaacagccagggcctgatcagcagccgcggtgcggtcgacctcggcgtaagcggggcgttcatcaaccagggcggcaccctggtgggcgatggcgctatcctgttgacggccaacagcctggataacagcaacggtgccgtttccggaaaagccgatgtcaaagcgaacattgctgctctggataaccgcaacggcaagctgatcgccagcagcgcgctagccctgagcggcgcctccgtggataaccggctgaacggcctggtaggggcgacaaaagcgctgacactcgatgtcgacgttatcgacaaccgccgcggtgaactctccagcagtgccgatattcgcctgaccggcaagcgcctgaacaacagcgacagcggcaagctccttgccgataccacgctgacccttgaaatggccgaagtgttcaaccgcaacctgggactgctcaagggcaagactggcatcacgctggacggccaggccctcgacaacaccggcggccaactattcagcgaccaggacgcacgactcaccctcggcgctgacctcgacaacagcgctggcctgatcagcagcgaaggccggctggacgtcagcagcgtcgggctgaccaacacggccggtagtctgtcgagtggcggcgcgctcaacgtcaaggccaacggcacactggccaaccagggtggacgcctggtcagcgacagcagcatcaacctgaacagtgccagtctcgacaacacccggctgggagtgatcagcggtaaaggtgcggtgactgtcactaccggcgcctacgacaatcgcaccggcagcctgagcagcagcgacagcctcgccctgacggcagggcaggtcagcaaccagagcggccgcatcggcagcgacaaggccctagtcgccagtgtcaccggcctggaccagcaggacggcaagctcttcagcaacacggcactgatcctggacctgaacaacggccaactgaacaaccagaacggcctgatcaacgcaccgtcattgcggctcaacgacctcaagggcgtgaacaaccagggcggtgaaatctccagtgcccaggccttcgtgctggccgccgacagcctggacaacagcagcggcaaactgctgagcagccaggccgtgactctgcggatcaaccaggcactgagcaacctcaagggccagatcgccgccgccgcgctcgatatccgcagcgccagcctcgacaacagcggcggtaccgtcaccagccggggcgacctcgacctgaccaccggcggtcaactgaacaaccgcgaccagggcctgataaacgccgcccaagccctgaacgtcagcgccgccgacctcgacaacaggggcggtaccctactgggtgccagcaccgtgaccctcaacgccatagccctgaacaacagcgccaagggcctgatcaacagccaggccggcctgacgatcaacgccagccgcctggactcaggcaatggcggcgaagtctcggccaagggcgatatcgacctgagcctcggcgccctggcccagaacggcggccgcctgctcggcgaccaagccatccgcctcgacctggcggggggtgatctcgacaaccgcaacggcctgtttaacgccaagggccccctgaccatcaatcgtctgcatgacctgaacaaccagggcggcgagctctccagcagccaaagcttcaatctcaccggacggacgctggacaatagcggcggcaagctgataagcagcaaccagttgggcatgaccggcaacagcctgatcaaccagggcggcctggtttccggctggcaggggctgaccgtcagcggcgcgagcctggacaaccgcaacagcggcaccttgtccagtcgcagcggcaaccttgatgtcaacgtgagcggcgcattgctcaacagcaatgctggtgcgctggtcagtcagcagaccctgaccgtcaacgcggctagcctcgacaacagcgccggtattctttccagtggcgcggaccagcgcctgacggtcagcggtttgttgaacaacgcccagggcggctccatcgacagcgccgccaccctgacactgcaagctatgagcctaaacaacagcggtagcatcagcgcgcaacaggccctggatttcaccggcaacatcctggacaaccgtaacggttccctgagcggcaaggccgcggtcagcctcgacctgctcggcgccctgaccaacagcaatggccagctcgccagcggaggaccgctggtgatcaggcgcagcagccagatcgacaatcagggcggccaactggtcagccaagggggcctcagtctgctcaccggcagcctggataaccgcaatcgcggcaccgtcgcagcgaatgacaacttggtgatcagcagcagcggtgccgtacagaacaacagtgacggcctgatctacagccagaacggtggcgtccgcgtcgacgccgcgagcctcgcaaacgccaagggttccctgcaagggcaaggcacactggacctgacggtcagcggcgatatcgacaatcagagcggtaagctgattagccagaatggcgacctcagtgtcagcacggccagcctcgacaaccgtggcggcaccctggccagcctcaagggcgccttcgaagcccacgtcgtcggcgtgctgaaaaacggctatgacctgagcaacaatcgccagggcggcatcattcaggcccagcgtctcaacctcagcgccctgggcgggatcgacaactacggcgggcgtatcgcggcgcaaagcggcgatgccctgatcaccaccgccgacttcgacaaccgcaacggcggcctgtacgcccagggcctggtacaggtcagcggcaacaacttcgacaacagcggcgacaacgacggacagatcgcaggccagcgcatcgacctcagcctcaacggcgcgcttaacaaccgcctgggcgttattgaaagcgacagcagtttgagcgtgcgtgcggccagcctcgataaccagaccggccagatccgtgcactgggctccggcggcaagaccgacttccagatcggcggcctgttcgataaccgcaacggcaagctggaaaccgccaacagcgacctgaccctcaatgccagcagcttccagaatatgggcggcagtctgctgcatgtgggtaacggcacctttgatatcagcaccgccaatatcaccaacgccggcggcagcctgttaacccgtggcggcctgaccttgacggcggacaactggaccaacagcagcgtgatccaggccgggcgcctgacggtgaacgtcaacaccctcaaccagacggcgggcggacaactgctggcctcggacagcctgaccggcaacggtggcaattggaacaacgatgggctgatcgccagtgacggcacggccaacctgaccctggccggcacctatggtggtaacgggcgctacagcagcgtcggcaccctgggcttgagcgcggcccaggtaaccctgggcactggcacgagcattgccggtggcggggataccacgatcagtgccggtggcctgagcaacgccgggcgcctgacgtccggcggttccatgacggtcaccgccaatagtatcggcaacaccggcacgctgggagcgacccaggacctgacgctgaagactccctccctggtgaacgatcacggcctgatcttcagcggccgaaacatggacttgctggtcaatgacttcaccaacgacaacggggatgtctacagcatcggcaacctgaacatctcgggactcaatggcggtcgcgccaatagcgtgaccaacctggcgtcctcgatcaatgtcgagggggatttctcgctgtcggcgaacagcttcaacaacaagaccgaaggggttatcggcaaagagcggctggtgtcgggcgatatcacgtttaacggcagcacgttctatatcgccgaaaactacacctcggagtcgaccatcagcggcacgcgagcgagcctggcggtggccggaaacattgatggcgatgtcggccgcttttccaacaccgcttcgacgatttctgctggcaagaatattcgcttgaacgtggataccttcgagaacctggggttggaggccggcaacttcgcccgtaaccgggtctataccggcgtgcgcaatatcttcactaacaaaacttacgcgaacgaagcgctggacgcctacgcgcgaagatattcccagtacgtctaccgatacaccaagaccgtgcatgagcccgacaaaggcgggactcacaccgagctcaacgattacggcaaacaaaaaaccacaaccgtgaacaccaaattcggtcagggaccggatgtggccattcccgccggcatcctggccggcaccctgagcagcgacaacaaagtgtttaccgccgggggtggcagtgtcgcctcggtggtccaggccgggcaggcgatacagatcaacgccaagaacaccatcgacaacagcaacctgcacgccaatacccagttctccgggacgacgaagaccgggaccgggacccaggtcggcagcgcggccaagccgacggtcgtctacctgaatccgcaactgccgccgaacctgtcccagcagcgggtggaccccgtggcgtcgcggggtttcagcctgccggacggacaaaacggtctgttccgcctgagcggccagggcggttctgcggcccaggcaagccaaaccagtgccgggccacagagctggagcatgggcagcgcgacagtcagcagtgcccagcgcgaacagggcgcggatgacgtccaggcgcgcaacctgcagttcagcgatgcggcgcggatcgccgtgagcactcttcaactcggacaaagtacccgccaggccacgggcgctggggtttccggcagcgtgatcagtgtcagtgcgcccggcgattccggcagtgtccagttgccggggcaggcgggcgtggtttccacggtaggcagccaggtcatcaatcgcgtgcagggcctgccggacacttcgggcaggtccaacccgcagaagtacctgatcgaaaccaacccggtgctgaccgacctcaagcagttcatgagttcggactacctgctggcgaacctcggttacaaccccgatcaaagcgccaaacgcctgggcgacggtttctatgagcagaagctgatccagcaggcgatggtcgagcgtaccgggcagcgtttcatcgacggccagacctccgacgaagcgctttacaagtacctgatggacaacgccatcaagagcaagcagcagctcgacctgtcggttggggtcagcctgacctcccagcaggtcgcggcgctgacccacgatatcgtctggctcgaagagcatgaagtgaatggtgagaaagtcctggtgccggtgctctacctggcccaggcgaccaatcgcctggcgccaaacggggcgctgatccagggcggggatgtgacgctgattgccggcaaagacctgaataacgctggtacgttgcgggccagcaacaacctttccgcgaccgcgggtaatgatctggtcaacagcggtttgattgaggccggtaaccgcctggatctgctggcgggtaacgacattatcaacaaggcgggcggggtcatcgcggggcgtgacgtcaatatgactgcaatcgccggcgatgtgatcaaccaacgcacggtggtgggtaatgacgtcaattacaaaggttacagcgggcacaacgagtatgccgacagtggcgctcgcatcgaggcggcgaatgacctgaccatcaaggcctcgcgggatttcgtcagcactggcagtacgttgcaaagcggcggtgacacaacgatcaccgcaggccgggatgccttcattgctgccgctgagcagcacaacagcgtggcggccggcgccaagagcagcagcgttacccagtacggctcggatctgacggtggggcgtgacctttctgtccaggcggggcgtgatctggcagtggtcgccagccagatagaggccaagcgggacatcgactttggagcgggcgataaccttacggtggcttcggctgccgatgaaagccactcgtattccaagtcgaagaaagttacgaaacaggaagatcacgtcaaacagatttccagcgtcgtgagtgccggacaagacgttactttcagtgccggcaaagatatggcgctgatctcgagtcggatcaatgccggcaacgaggcttacctggcagcggttggacaactggatgtactggcggcccaggacaccgactactcgctgtatgacaagaagaagaagggcagctggggacgcaagcagaccaaacacgatgaggtgacaaaaaccatcaacgttggcacccagatcaccacggggagtgatctgacgctggtcagtggtggtgaccagcgttatcaggtcgcgaagcttgaaagtggcgcggatctgacactgagaagtggcggagccatcaccttcgagggcgtcaaggatctgagccaggaaagccacgagaagaccaacaatagcctcgcgtggaattcatcgaagggtaagggccataccgacgaaaccttgcgccagagcgaattgatcagcaagggcgacctggcgatcactgccgccaagggtctgcacatcgacatcaagcagattgaccagaagacggttagccagaccatcgatgcgatggttcaggcggatccccaactggcctggctcaaagaagccgagcagcgtggcgatgtcgattggcagcgcgtgaaagaggtccacgactccttcaaatacagcaactccggcatgggcatgggcgcaatgctggcggtggtcattatcgtaacggtagtgacggcgggttcgggaacggccgctaccgttggcgccagcgcaagcggcgccgcgacagccgcggggctcagtgcgaccactgccgccgcgattggtgcggctgcatcggcagcctataccgctgccgtggtccagactgtggtcagtacgataaacaacaaaggcaacctgagcgcggtccttaaggatgtcacctcgacggaaagcctcaaggggtatttggtcagtgggctggttgcgggctttgcatcgggtgtactggacaaggcgttcggtgtttccgccgaaaatgccagtaaagcgacccacggctttgacctggccagcaccaatgaactgaccaagtttgttggctacaccctggctgaaaagggctttggtgcagttgccaatactgcgatcaatggtggcagcctcaagaacaatctggcccaggccagtatcagtgcggctgcggatgtcctctcggcctccatctataaccggttgggtacccagttggaattcaccgggattccggccaaggtcggggcacacgcgattgtcggtggcctgatcgcagaggcggcgggaggcagctttcgtaccggtgcccttgccgccggtgccaacgaagcttttgtcgcttcggtcggcgacaagatctttgtgggcgacatgcatgatcaactgctggcgatgacctcgcagttgatcggcgtaacggtcgctggagccgcagggggctctgataaagaactggaagtggcgggctgggtcacccagcaggccaccaagttcaacagcctcgatcacccaactgccgagcgattgcttaacgagctgaaggcctgtaggtccggtggaaattgcaccgaagcgaaacagcgcgatctgataggcaagtatgaaaagatctcggccgaacgttcgcagttgatcgacctatgtgaaacccgggcctgtgtcgaaggcctgaaagccaataccatcgctatggacgacccggttgcgcaggagttggtcagcttctaccggaacaaggtttcctatgacatgaccgggatgctggtgggcaatccagggctcatcgcgcaaccggcgcaagggtatgacccttggggcaatatctatgtgaccgatgaccagatcatcacggccaaatacatcaaggaaggctggttgacgcccgccgagagcgccaatctcaaggagtgggagaacaagacctcctggctggacgatgcggcgggtcggaaactcagtgtggtcgaaagagccgccatgatcagcaacatgggcaatacgttgctgaccgagggctgggggaccaaggttgttgcgggtgtcggtaaaggtgggaaacccggcaatggtgtgtcgacggatgccgatggggtcggaaatagcgccgttgttacgaaaccggtcaagccatgctgtttcgccgcaggaactatggttgccaccccccagggcccccgggccattgacaccctcagcgtgggagatattgtctggagtaagcgagaaacaggaggggagccgttcgctgccgctatttcggctacacacgttcgtactgatcagccgatttaccagctcaagttgaaaaacatccgagcagatggagtttcagagaaagaaacgcttctggttacaccgggccatccattttacgttcccgcacgacatgactttgtgccggttatccagcttaaatcaggcgatttacttcagtcgttagggggcggtcctactgaaggtgtctcgaccagggttgagtctctggagttgtttcttccacaaggaaaaacctataacctgaccgtggaagttggtcatacgttttatgtgggtaagttgaagacctgggtgcacaacgttggtctgtgcgatattaatggcaagcctgtagtgccgaggaatgccaagaatctggaaggcggacctctggagaaagccgataagttcagtgggcattttatgctggagggagggcctgccaatggaactctttatcgtgctgataataaaggaaatataacgagttatgccgtttatgatgataaaggtatgattctcaaacgggtcgatgtgacgggcgattcacatgcagggatacccacgcctcatgctattgactatggtcgcaacaagttgccggatggatcgatcagggtacaatctccatcgagcaagaaacctccacggggcatcagtgcagaagaaattccatgaaaataatcaagattacagactcagtcagttctccaagatacgagcattggaaaagccaatgggaggatcagtccgagttggatgagttttcttatattagtgatgttgtgcatcctgaagatgccttgttgttttgcaaggttttatttccagattttgtcattcatgaatcaggtgtgtttctggagcacagctttacttttgacgcgttctctacttggatggaaacttgtaataatgatgtagtggcagtggagaaggttttgaatcatacgcatctgtatgatgtttttggaggttgtagggatagagtggatgaggctgtttatgaacagctttgcaggattgttgctcagtcatggaggatggtgttgctgagtaaatttccagaaaagaaattttgtgtgcaagcgatagtctccgatcaggaatatggcccagtggttactttttctcaggtcagagactagtttttatggatgccttctaatctatagttttttatggtgggaatttcggtttgatcgctcccacgccccagagtggtagcttttcaccggacgctctgcatccgctctttgtgacacagagtgtcacgggctgcattccacgccggagcgtgggaatgatcgcattacaggctatcggggtctccggactccagcggatatgatggtctgcgcctgattcgagaggagagcacttctgtaagcgctccatgaaccccaccttcaaagcgcttagctgatctcggatgctgtgctctcgattctctcaggagccagcacaccatgatgcgacccgatgccaaagtcgaaaaagtctatctctatcccaaacccgtgtactttcgaaaatccattgatggccttgctgcgctggtcgagctggatatcaaagtcgcggtattcgaccctgtgcttgcctaagccttgtggcttttgcgggcgtatattctttgcagccgattcttgaagctgattgagccggcgttttccgcgttcggccagcagccacataatcgtgccgatacccgctatgacaccgatcgctatccaggcgtttttggggatcgcagcgagagcactgaatgccatagcaaaaataataagtatgccggtgccaccggagttttttgctttcttccttgccatgtgtcatttcaaccttgaaagatgggtactggcgcaatggcggtatccaatatttctaacgcttgagccaatggcttggctgagcagataatcggaaagttgaacgatctgggatggaaatgtcatttcagctcgaaatttaatgcttagcgtatttcatctgaacgtcgcgacatttacgtgagccatcctcagtaatttcaagcaacagtagtgaggcctatctgacaacgacctgagtctaacggagccttccgcccccattaatagatacggaccacatgcccaggcggacattcctgcgggactttcagtgaatcacgccgctcgagcatccgtgtttgccggcaggagcggacaatttccagcgcttgagcgaatgtgcttgatcccccccctgcatcggcgctacggggtagcgtaggcagtagttcagccattaactgaggtcatcgactagcgctcaacggcggttgggaacagtgcaggggagacttttcgaaaatggaactgttgggcctcaggctgggggcatccttttcaaaccatccaaagcatgccctcagatgtgcccccaatgtagcaatccaccggaagtgaatggagctccatggtttgtggaaaggcagaaatgatcagccgaacagcctgccagacgacgtctaaagactctcagggtccccaaaaaacatctgaatccgcgaccgcaaccaccgctctcccgggtcgttatcctgcgacccacgccacgccatgtgcagttcgaagctgcgcaccggcaacggcggatcctccgcccgcaagccccctgccgaggtcaatgcctcggccgcgtagtccggcactgtcgccaggatgtccgtgcccgccagcaacgtacccaggccgttgaattgcggtacggccaataccacgtgacgtttgcggtcgagcttttccaactcttcatcgataaagccgctcaggtcgccggcaaacgacaccagtgcgtgtggccgcgaacagaagtcgtcgaggctcagggagcctggcacgctgtcagcgcgcagcagtttgggcaggctgcggcgcagtactttgcgtttggcgttggccgggaggtcggcggtgtagctgacgccgatggagatttcgccggaggccagcaagccgggcatcaggatgtaattgacgcgacgcaccaccagcacgatgccgggggcttcggcgcgcaggcgtttgagcagttggggcagcagggcgaattcgacgtcgtcggacaggccgatgcggaacaccgctgtgctggtggccgggtcgaactcggcggcgcggctgacggcggtggagatcgagtccagggccggggagagcagggcgaagatttccaccgcccgggccgacggctccatgctgcgaccggtgcgcacgaacagcgggtcatcaaacagcccacgcaagcgcgacaacgccgcgctgatggccggctggccgaggaacagtttctcggcggcgcgggtcacgctgcgctcatgcatcaaggtttcgaatacgatcaagaggttaaggtcgacacgacgcaggtcgttacggttcatcttgtgtcctggaagagtcagcaaacttgacgagagcagccatataagaagaatgaccggcatgaatcttacgggtaaaggctgttactctgcacaggaaaattgagttttcttacaagctctgaggtctattcctcagttgcggaatcaatgacaggcatgtcgactattaatggcgaccggtggtcttacccggaaagcccagatagagttcatggcattagaggttactttgacgaggtttgcgatgtcccgcacgatccgttttcacaagtttggtccggccgaggtgctcaaatgcgaagagcatgcagccgcgcagcccgcaccgggcgaagtgcaggtgcgtgtcgaagcgattggcatcagctggtatgacattctgtggcgccagaacctggcgtcttcccacgcacgcttgccgtccggccttggccatgagatggccggggtggtggtcgccgtcggcgatggcgtggacgatttggccgtgggtgacaaagtcgcaagttttccggctgagagccccaatgattacccggtgtatggcgagcagatcgtcctgccccgttcggccttgacccgctacccggatgtcttgagcccgatcgaagccagcgttcactacacgccgctgttgattgcgtattttgcttatgtggatctggcccgggtcaagcctgggcagtttgccctggtgacagatgccagtcactgtgccggcccgtcctttgtgcaactgggcaaggccctgggtgtgcgggtgattgccgcgaccaaagacagcgcggagcgcgagtacctgctgtccctcggtgcggaaaaggtcatcgtcaccgaagagcaggacctgctcatgcaaatcaacaaattcaccgacaaccgtggtgtcgacgtggtgttcgatggcttgggtggcccgcagatgtcgttgctcggcgatgtgctggcaccgcgtggcagcctggtgctgtatggcttgcaaggcggtaaccagacgccattcccggcgtgtgcggcgttccagaagaacattcagttctttgtgcactgcattggtaacttcaccggcaaacccgaactgggcatcatccaggaccaggtggccctgcagcgcgccttgcgggatatcaaccaattgaccgccgatcgcgtgttggtgccgctgaaaaccacggtgtttcccttcagccagttcgtggaagcgcaccgctacatggacgaatgcccgtgccgcgaacgcgttgcgttgcaggttgaagctgtttagggcgtaggaagattcttaaaccagccttcctaccacccgccgcatgaggcaaatgcgccatttgacaaggctgaacctgcacagcccgccaggtacccagctggcgctttagcccatgaatccggcctttctctccggcgccgccctggaatccagcgcggcgtctttgtgtgcgcgtgattaatgcaggcgacggtggtttatctgcactggttttcggtcaggttctgtatctattaatcattatttcagcactgataattacgccttcactttcatctcaaggactgagcaatgattgaatatccgacactgcaatcgcgagtgctcgaagcagagactgctgcgcttgtgcggaatcagggaagtagatatatccaggacaatcctcaatccaataagttggaaagtttgttgttttacttgtcaggcacgtcttagattgactggttaaaggcgtgtaggaagttgtcggaacattcctaggttttcagctcggccgcgctttggcctagataaatcgaggggtggagggtttcaaggctgggctgatacccgggagtgtccgtgtcgttttgttgcgcggtgctactgtttatttagcgcctcacaaagtgatgcggaactttctatgcgtgcaatagatcgggcaaacacgctcagtagttgctcgaaactgacatttcaactcaggtagtagaacgatgagcactattcacgaacaggctatgaattatgtttaccagcaagttttgcagcgtttgatcgggcactttaatcgtgcggagcgaacagcgcttcagttgttggtccagcggattgtcgtggccgcgggaggtatggagcaggtgggagactacaaggtgttgatggcccatggtggaggcgaagtcagcagctgtaccttggcattgctgcgggctgcacagctgaccatcgccgggcgagcgccacgaaccttcaagttgcgggtggcaacattgcgccattcgggcatgaccgacagcaggctcgacagcctcaatcagggttacgggcgcttgttccttcacgatgacccgagggttgaactactgatggtggagaaccaggaagtattgcccttcaaccatcaacgcccggcctctgccatggggcgagaaaccagccagcgcaacatgctgatgatcggccacctgagctcaggtgattgccgtgccactttgtgcagcgacacgtatctggcactcggggatttctaccagcgcgtgaccacctggaatggcggggtacatgccctggtcagtggtgattccccgcgcaagcaagggcagtttctggcctggctgaagaaaaccgcccagagcgctggcgttccgatccccagcacctggccgttgtcgctcaccgggttgtttgcgcgcatggacgagtggagcaccagctactaccgcgaggtgtacggtgaacattatgtcgccagtaccaacccgagcaaggcgggtcaccgtcacttggcttacatcagcatcgccgacctgctggaggatgtggatacgcaaatgtcgccgatattgactgaattcatggcgtttgctcccgacccgcttggatttcatttcagccatcctggctactccaatcctctgatgatggctcatctgcgtggcttgcaggcccgctgcctgcgggaccttgactacgaagagggggttcaaggctttatccgccaggcctcgcagttcctgcggcgccagcacctgcccgaggcgtggctggcgcaggtgggcatcggtacagacggtgcgctaacgagtaccgccgcgcagcagttctttgggctggatgaaacacagttggtgtgcctgctgttctcgccgtttatccaccatggggagcggctggaaggctatttacgtcaatgccaccctggcatgctggtggccttgcctgagttgcataaggtcctgcagggcaagcaatcggccgatatgttgcagcagtgggtcagcgacaccagtggcctgccgatgcccttgttgcaacacctctatcgcaagcgtccggtgcccagcgcggttggtaaatcgcgcagtgcaggcgccatggcccacggcaacgcacccgcttgccaattgtccgggcgatgacactgcgcggcgagcgacaagccgacttcgcgtatcaggcggtctaccgctacatgatcaacctgatcaacgaagtcagcaccgatacccgtgtaaagctgccatcgctgcggcaattggcgaggcgcctgaacgtatcgatctcgacgattcaatacgcctactcgctgctggagaaggagggcagggtctactcggtggccaagtcgggttattacgcctggccgctttcagcaagtacggtggcaggcggtagcggcgatttgcttgaccgtctttacgcggcggcacgcagcccgtgcatggcggtgttcagcggcgatgagccggcgctgctggcgtcgctggatggggcgctgttgcgcctcgaacgggagctggtgcgccagtacccgcgtcatctgcaaccctggtcacagccgtgtggcgtatgggagctgcgtgcggcactggccgcgcggtacacctcgtcgcccacgcgttgctggcacgccgacgacatctacatcggggccgacctgcgcggggtgctggatatcctgattgaggtgctgggcctgcgggggaccacggtgatcgttgaatccccctgcgactggctgattttgcgcctgttccaggattgcgcggtgcgcatcatcgagttgccctggaccccggaagggcgcctggacctgatgacccttgaccaactgttgcgcgatgagccggtgcacctggtattgctgtcgtcgaaggtcagcctgccatcaggcaatgccctgcctgcccacgaccgcctcagcctggcacagatgctggaccggtacggttgctggctgctggaaaacgacacttttggcgagctgggtttcaaggagccccaggcggcgctgcgtgaatgggtgaacccggagcggctgatggtgttttcctcgttcgagaaaatactgggggcggaagcgccctacggctatctgttgtcacggcgcatgagcagtgaactgcagcgccagtttttgctgcgctcgttccgcttatcatcgatccgccagcgcgccatcgcccgcctttatcagagcgggcgaatagacccgcacttgcgggcgttacgccaactactgcaggcgcaagcggctgaaatgagcgggcgccttgagcagcatctggggcagcaggtgagttatcggatgccggctgccggggcggcgttctggctgggctccacccaggccgtcgacatgcgccaggtcttcaagcgcctgcttgcccagcaggtcgtgattgcaccgggcgagctgttcagtgtcagcggcctgcatcatcagcacttgcgcgtgagccatacctttcatgggcagcccaacctggagatcgccttggcggccataagcgaggccttgcgtcaggctcaaacgggatgaccgcgtgaagcttctcttactgttgtaggatcgataccgtcgcgcagcagtccaactctcagtaaactgccatttttttccgaatccttctttccgaggtttatgcatgacaatcagtccttttgcgggcaagccggcgccagcccagttgctggtggatatcccgcgactggttacggcctattacactggccagcctgatgcagcaatctccactcagcgcgtggcattcggtacgtccgggcaccgcggcagctcgttcgaactgagcttcaacgagtggcatgtgctcgccatcagccaggccatctgcctgtatcgcgaagcacaaggcatcgacggcccgctgtttgtcggcctggacacccatgcactgtcgacacctgccggagccagcgccctggaagtgctggccgccaacggcgtgcacgtgatgctcgccgaaggcgatgaatacacgccgaccccggccatctcccacgccatcatctgctacaaccgtggtcgcaccagcggcctggctgacggcatcgtcatcacgccatcgcacaacccgccgcagagtggcggctacaagtacaacccgcccaatggcggcccggccgacacccacgtgaccaagtggatcgaagccaaggccaacgagctgctcgccaacaaactggccggggtcaagcgcatcactcacgcgcaggcgctcaaggccgacactacccatcgccacgattacctcaacagctacgtggccgacctggtcaacgtgatcgacatggacgctatccgcagcgccgacctgcgcctgggcgttgacccgctgggcggagcaggggtgcgctactggtcggcgattgccgagcactaccgcttgaacctggacgtagtgaacaccgaagtcgacgcgactttccgcttcatgagcgtcgactgggacggccagatccgcatggacccgtcctccagctacgccatgcaaggcctgatcggcctcaaggaacggttcgacgtggccttcgcctgcgacccggaccatgaccgtcacggtatcgtcaccccgtccggcggcctgctggcgccgaacaactacctggccgtgtccatcgactacctgttccagaaccgtccggactggcgcgcagacgcggcggtgggcaagaccgtggtcagcagcggcttgatcgaccgcgtggcggcccgcatcggccgtcgcctttacgaagtgccggtcggcttcaaatggtttgccgatggcctgttcgaaggctcgctgggttttggcggcgaagaaagcgccggtgcctcgttcctgcgcaaggacggcacggtctggagtactgacaaggacggcctgatcccggcgttgctggcagcggaaatgacctcgcgcaaaggccaggacccgagccagatctaccgtggcctgaccgacgccctgggcgaaccgttcgcgattcgtgtggacgccaaggccacaccggcgcaaaaagccttgctgggcaagttgtcgcccgatcaggtgacctcgaccgagctggccggagaacgtatccagcagatcctcagccacgcgccgggcaacaaccaggcaatcggcggcttgaaggtgatgaccgaaaacggctggtttgccgcacggccatcgggcaccgaggatatctacaagatctacgccgagagctttatcggtgacgatcacctcaagcaactggtggaagaggcgcaggtgttggtggacggcgccatctccgactaacgctgcaatatcaatgtgggagggggcttgcccccgatagcggtgtgtcagtttgcatctctttttctgaaacacagccatcgggggcaagccccctcccacagttgattgaggtcaggccaggtctaccaggacgatttcgctgtcctcgatcgcggttacccgcaaaacctgttcattctctaccgcaacaccgtctcgcgcttgtgcacgcaagccattgacttcaatcacgcccgtcgccggcactagatacgcacgacgcccaccgtccagccggtactcgacagtttccccggctttcaggttcgctgccaccagtcgcgcatccgcacgaatacgcaggctttcattgtccccggccttgccactggccagtgtcacaaacccctcgcggtcgcctttcgggaacggcttggcgccccacgaaggcggcaaaccggcttcattcggaataatccagatctggaaaatcttcgtcggcgcatcttccaggttgtactcgctgtgagcgatcccggtgcccgcgctcatcacctgcacatcaccggcctcggtacggcccttgttgccaaggttgtcggcatggctgatcgcaccttcacgcacataagtgatgatctccatgtcgcggtgtgggtgctgcgggaagccagtgccgggcgcgatgatgtcgtcgttccacacccgcaggttgccccagtgcatacgcttgaggtcgtggtactcggcaaatgaaaagtggtgatgggcgtcaagccagccatggtgggcgccgcccagggaattgaatggtcgaagttcaagcatgatcgtctcctgtggatgggcctatgatcctgcagcccatgatcgataaaaagcgtaaaaaatgcctgattcctatcgatttaatggattggttagtggcgttttgactttcagttcatcgcctaactgcatgaccgcaaagcaattggctggaactgagagtcgattccggcgaccatggcgcacttgtcacaacccagctcaacgcaggagtccgcgtgtcgcaacaaaagcctgatcttcctcccgaactgcgccccttggctgaaatgccgctattgaagcgcttggccgcgcgcctgtttggccatggcctgacccgcttgcgcgcccagcatcggttttcctggttgcacgggcaggccgacggttttcgcagtgggcacgaggcgggcgtggagtacggttaccgtgaaggcaaggccgatggtatcgaggaaggccggcaggtcctgctgattcgtgacttccgccccgatgagcaccgagcgccgcgtgtggacgacagcctgttcgatgattggcgcctgccgctcactgccgagttgaagaagcgcatcaaggcggatgtcgcgcgattgctaccggcccatgcccagcccagcgcggcgcaatggaagatgattttcagcgatacaccttcaacctcggtgattgccggggctggcgcgggtaaatccacctcgctggtgctgcgtatcctgttgctgacccattacctgggctttgagctgagctccatgacggtggtgacctttacccgagagtcgcgcaaagacttcatcaacaagctcatggaaattctcaacctgtggggccaaccccttggtatgaaagaagcgcaggccgtggtgcgtacctttcattcgcgcattctgccgatggtgcgcagcctgccgggctttgaacgcctgcaagcgttcgaaaacctcaactcgggcttcgaagacgccgacagcaacccctttgacctgcgcatcaacgatgcccagcgccagcaaatgaatgcctgttatcaccacctgcatgggcggcacccacgctttcgcgagttgattgcgccgctggcacgccatggcctgcagctcaaggaactggagcgtgatcatcctgacgtgcaaaagcgcgtagcggtgaccgaactggcagccaagcgtgatgaagagctgtgtgatgtaatcgaggacctgtggtttcgcgccggtgcctggccgatcaagggcatcgagcccaatcgccagaccgtggagatcaatggcgcgcaatttcactgccatggctatatccccgaactggacgcctgggtcgtactgggcttcgactcgcgggaaaatgcccagctcagccggcccaacgcgaaactgccagtgcgcgcagaatgggcggtaaaacgcactttgtttcaagctttctgtcgtaagccattgatatggatagacagttatgaatcctcaaggcgtctgttgagtagcttggcaggggatgccactgctgggccaggcttcgattacaaggtcacaggcgagctggcttcggcgccgttgctggacagtttcgtgatggcggccgggtttatcgagaaccttgggctggatgtacccaccgcggttgggcagatgagctttgccaaggatgacccggaccgcttcttcttcgaagccctgagcattttctggaaggccctggaagatcacctgctggaccagtcgccgccgatcatgacctacaaccgcatgttctcgctgttcggcgagaacaccccggaaaacctcaagctgctcagcgacccgctgttacggccgctgtcgcacctgatgatcgacgagttccaggacgtttcgccacagatcgtctcgtggatccgtgccagcctgcgcgagatccgcagccgtggcccggccatgcacgtcgggcgcggcgcccagcattcatcactgttgtgtgtgggggatgactggcagtcgatctacggctggcgtgggagttcgtccaagtacttcatggaattcaacacggagttcccatcgcctgccaccacccgagtgatgctgggcgagaactatcgcagtcaccagtacatcatcgacgcggccgagcatatcgtgcgcgccgcacccgccatccccggcaagaaggccaaggccagcggggcgcccaaggctttggtgccggtcatggtgctggaacgggacgatgcggcattgggacggcaattgctggagcattaccagcgcggcgaatcagtgctaatgctctatcgaaaaagtagcgataaattactgattcaagagcatattcagtcaatagttaatgtggattctagcttgccgcctccggcgcgcaggctgaaacaattgacctaccacagcgccaaggggctgcaggccgatgcggtattcctgcttggggattgccagcatgtcacccgttcgccgtataaaaaccaggtgtaccgcatggcgggcctgggcaaggacggggacagcgagccgtacgacaacgcgcagaaggacgagatcttgcgcctggcgtatgtgggcatcacgcgggcggtgagtcattgctactggtacgtggaaaagcccgaaggccaggcagtcaatgtgcccaaggcgtcggagcgggtagatggcaggaaagcgttttttgatgatcagcgcttttaggcgctgatcacttcaggcccgcagggactgcggcggcacaaacgactccaactcgtcctccaccgcctcgatgatccgctccacatcggcggcattcatcaccgtggcgcaggggatgccggcgatggcgatcaacgtctcgccgctggcccggtcgaacaggcgggcgatcatgctgccgggcgcgtccatgctgccctcgaagcccatcggatggaaatgccagcgcatcagctggcaggcgttggggaacgtcactttattcatgttgcccaccttgttcattgagcgcttcctttagctcgcggcagggggccagaccttcactggtcgtggcggtgtagagcttaaaaatagcattcgttcgtcaccgcaaggtgactttttcggccccgttcggcggttgttttccataaggttgatgtgggtcatgtcctacttgggattgggcaaaaggccattagtcggaaacgtcaattggccattgaagcacccacagaaattcggcaatctccagggtttacccgccgcagagccgtccatgcccgacatcgctgcagacgatgaatgccagcaatcccacgccacgcgagagttggtgttacgccatcacctctgctggcgccaccgggacctggaaggcgtgatgtcctactaccacccggacatccaataccacgactttttccagaaccgagtcgtcggtttcgccgacttgcgcgattacctgcaagccagcatgccccgtgaggctgacgaagcgatcgagcacagcgaccgtatccgtgccgacggcgataccgcgttcatccagtaccgcatcaccttgcggggcagccagggcctggtgtcattccgcaccagcgaagccattacggtgcgcgacggactgatctggcgggtcaacgaatacgcgtccctggtgcacgagcagccggcccaggccgcacggccctctgtcagccgcctgggcctgtcgccccagcaattggggcatatggccaatgacctgcaacagtatttcgaacgcaagcaaccttacctggacccggagctggacctgcaacgggtggccaaggagtgcggctacagccgcaatcaaatttcctacctgctgaaccaggtgctggggcaaagcttctaccgctacgtcaaccaggcaaggctccagcatttactggccgcgctggatcaggccgtaccgccgatcaaggtcgatgacctggcgtttgccgccggtttcaattcgctgtcggcgttctacagcgcgttccgccagcatacgggccagtcgcccaaggcctacgtcaaacaaatttctctgcgtgcacgcgcgcaagacagcccataacacggcgctctaggatcaaccctatcgaaacgaggtaggggaacctggcatgccggcatggcgcaacatcagtttatggatggaccagttggacgacccgctgcaggcgcggccgacgctggagcatgacctggacgtcaacgtggccattatcggcgccggttacaccgggctgtggaccgcgtactacctgaaacgccaggctcctgagctgaaaatcgccatcatcgaagcgcaaacggccggtttcggtgcatctggccgtaatggcggctggctgatgggtaatctgctgggtgaggaccgcttgctcgccggcctgaatcccgaacaacgtcgcgcttcgtttgacctgctgcacgccatccccgatgaagtggcccaggtgctggcacgtgaaggcatcgactgcgactaccgcaagggcggcgccttgtactgtgccgcgcgctaccccgagcaggaaggcagcctgcgccgctatttggacaaactctacgcccaaggcctgaccgaagacgactaccgctggctcgccccgcagcagttggccgagcaaatccgcatcgccaagccctatggcggcatttacgcgccccatgtcgcaaccatcaacccggccaagctggtgcgtggcctggcgcgggtggtcgagagcatgggcgtgatgatctacgaaaacagcccggtcacccactggcaatccggcagcctgcgtaccgcaaaggccggtgtgcgggcggcctgggtggtgccggcggtggagggctatgccaccaccttgccgccgctgggtcgctaccagctgccggtgcaaagcctgatcgtcgccaccgagccgttacccgccagcacctgggatgagatcggcctgagccatggccaggcctttggtgaaagcagtcgccaggtcacctacggtcagcgttcggcggataaccgcctggtattcggcgcgcgcggcggttaccaattcgccgggaagctacgccacgacttcgatttgaccgacagcgaagtggagctgcgtcgctatctgttcggcgagctgttcccacagctcaagaacgtcaggattacccattcctggggcggcaacctgggcatgtcgcgcaatttccgtccgcacatgctctgcgaccacaagacaggcatcgcgctgtccggcggttacggcggggagggcgttggcgcgaccaacctgggcggccgcaccctggccgacctgatcctgggccgcgacacgttgttgacccatcagccctgggtcatccgcgaacgcggcctggacgcgctcaaaccctgggaacccgaaccctgccgctggctgggctacaacgcgatcattcgcagtttcgtccatgaagaccaggtactggccaaccccaataccgccccttggcgccgcaaactggcggccggtgtggccgggttcatggaaggtttcatgcactaagtcgtttcattcacacgggaaaacccatgagcatcactcagttcaaagacacgctgaacgcccacctgccggactcgtcgcccgtcgccgtgcccttgggtgagcccattgccattgcgtcgaccctgagcgtcgagcgcaacgacggcgtcgagaccggcatctgggagtgcaccccaggccgttggcgtcggcagatcaactcccaggagttctgccactttatccagggccgctgcaccttcaccccggataacggtgaagtcgtccacatacaagccggtgatgcactgatgttgccggccaacagcaccggcatctgggacatccaggagaccgtgcgcaagacctatgtattgatcctgtaacgctttgatccttgatcgcctgccataaaaacagccctaaaaccgccaggaaatcgaaccatgaaagccattgccctgttgcccttgatgttggtggcctctgtcagccaggccaccgagacggtaaaaatctacaactggtcggactacatcgcgccggataccaccaagaacttccagaaagaaaccggcatcggtttcacctacgacgtgtacgacagcaatgaaaccctcgacggcaagttgatgaccggtaaatccggctacgacgtggtgttcccgtccaaccatttcatggcccggcagatccagggcggggcattgaagaagctcgacaagagccagttgcccaattggaagaacctcaacccggtactgctcaaggccctggaaaacaacgacccgggcaatgcccatggtttcccgtacctgtggggcagcaccggcatcggctacaacatcgacaaggtcaaggccgtgctgggtgacaacgcgccggtggattcctgggacctgatcttcaagccggaaaacatggccaagctgcagaaatgcggggtggcgatcctcgacaacggcccggaactgctgccggccgcgctcaactacctgggcttgccgcaccacagcaagaaacccgaggactacaagaaggctgaagacctgctgatgaaagtgcgaccttacgtggcgtacttccactcctcgaaatacaccgccgacctggccaacggtgatatctgcgtggccgttggcttctccggcgacatcctgcaagccgaaagccgcgccaaagaggccaagaacggcgtgaacatcggctacaacatccccaaggaaggcgccgccatctggttcgacatggtcgccatgcccgccgatgcaccggatgaaaaagccggctacgcgttcatgaactacctgctgcgtccggacgtgatggccagcatcaccaactacgtgcactacgccaatggcaaccaggccgccgacagcctggtggacccggcgatcaaggccgataccaaggtgtacccaagcccggcaatgatgggcaaattgtttgcgctggaagcgatgccactgaatatcgaccgtgtgcgtacgcgggtgtggaacaccgtccgtaccggccgctgaaattccgtggtgagcgggcttgtcccgcgctgggctgcgaagcggccctaattccagcacccggtaggtgtggcaggccgcctatggacccgtccttcactgcaggcgcggtccatagagtttctagcgattaaaaccgatttcttagactgtcatttctgacaggttttatgtttggacaaatgacttaagctcctgatgcctactagtcatcaaatggaaaaaggagtttttatgccaaacgtccctgatatcgtcctgccgaaaatctacccgttcggtagcatggtgggtgcggtaaccactggcggtgtgccgagtattttcatagcgacatcggtctatcgcgacgaacaaggtggaaatattcgatttattggccgaatggaaggttcagatccgctagcgccagcaatcatccaagtcgagattaaggatcgtgacacgccaagcggtacttacacattagcggacaaagtcttgagggttatttacgtcccgcatggctcgactgcgggccgccttgcagtcagtgccgaggtgctgtttattcgctccggtccgattgactggattcgaggacgtgtggaggctgaaaccccgcagggtgatgtgatagacgttgtgtactctatcttcggaatgggttgaaaggcttgaaaccgacagggcggttttctgaagtcgacttcagatcgccgctctttaccgggtagtgatatccgcattcacggattctccagatcatgccccaacgactggataaacaacgaaaacagctccggctgtgacgagatatccagcttggcgtacaagtgtcgacggtgcaccttcaccgtgtccggcgagatgttcaggcgttcggccatggccttggacgagaacccgcgcagcaccaggcgagcgatttccagttcgcggtccgagagcacaccacagccgaattgactcagcgcgtcccggatctggctacccatcgccggcgtacgctgggtactctgctgccagtgctgctgcatcagcggcaacacccaggctgccaccgtggtcatcaacccggtctcctcaaagctgaagcgccgctgcatgcccagcgacagcgacagcgtgcccgcgcccggcagttgcaggatgaattgcacctcgtcttccagaacgttgtcatggaagtaattgaggaagtactcactctggcgaaaatgatccggcgccacttcctccaggcggtacaccccgctggcatacccctcgcgacaggcctggaagaacgggtcgagcaaatacaagccgttgaggtacaccagcatcgacgccggcttgctgctgggctgggcgtcgtattcttccagggcctggggtggcccttccaaggggtagaagatcgccagggcgttatcgaagggcaggcattggtgcagcaacagcaccaactgcttccagaaacgctcggtgccgatgtgctcaacggtgcggcccaggccggcgtgcatcccaacctcgcgaaacaggctcatgtgacaggctcccgccggcaaaaagatcggccaagggttcggcttttgccgggtggcgtcaaggggagtacgccaataggggaattggccgacatgccctcacgtattaacgtccgcatcattcagcgggaaacatatcccgtgacttatcagatttttcgtttctgcctcataccaagaacaacgacagaggataacgatatgagcacttcccccacgcccgaaggcgtgctgaaacccaccttgagtgtgttcgatgtggtcgccattaccgtatcagcggtgacgccggccagttccgtgtttgtgatcgcaccgtttgccatccagcaggccggcagcggagtgttcctggcgttcgtgatggccggtctgctcgcgctgatgtttgcgttttgctacgccgaactgggccgtgctcacaacagcgccggtggcgaatatgtatacgccaagcgcgtgttcggcggcatggcgggctacgcgacattcctgaccgtgctggtgatgttgctgtttatcccgccggtactggctacgggcgcggcaacgtatctgaataacgccctgggcacgaagtttgattcgcagacggtggccctggtgatcgtggtgtgcagctacgccctgggcatcctcaatatcaagctcaacgcctggatcaccggcacctgcctgttgctggaagtcgcagcgctgctggtgatcgtggtgatcggcttcggcaacccggtgcaaccggccagcgtgctgttccagccgcagatcgtcgaaaacggcgtgttgcacctggcgccttgggccctggtgatcggcgcggtgggcatcggcctgttttcctacaacggctacggcccggcggtgttgctcgccgaagacatgaaatgcggcggcaaaggcgtgcacaaggcggtgttgtggtcgctggggttggtggtgatcatcgagttggtgccgatcatcgccctgttgatcggcgcgccgtccctgagcgcgatgatcagcagcccggaccccatcggctacctgctgaccagccatggcaatgaaaccctgtcgcgcctggtcagcgccgggatcttcctgtcggtgttcaacgccattgtcgccatcgtgatccagatcggccgcgtggtgttcagcagcgggcgcgatgcgctgtggacgccgggcatcaacaagctgttcacgcgcattcacccgcgctgggattcgccgtggttggctacgctgttcctggcgatcccatcggcgctgctgagtttcagctccaacctggccgacctgacgtcgttcagcgtattgctgatcatgctggtgtacctggtggtggcgttgagcgcgttgatgagccgggtgctgctgcgtgatcgcgagcatccctatcgcatgccgctgtggccgttgccggcgttggtggcggtgctgggcgcgggctatttgttaatgaccttgatcgtggcggcctcggtccgcgacatcctgatcatcctcggcctgctggccctgtcggtgatcctgtattgcatcagtggccggttgagtccggtcttccagaaattgtaaggagtagttatgcgcgcacgtcaattgggcatcacgttggggctgggcacgcccggtgagtggaacgccatcactgatgtgccgggggtacgggtcgggcacagcacgctcaagacccgtatcgatggcaagcaggtgcgcaccggcgtcagcgtgatccagccgcgcgcgggggaggctcgcctgcaaccgtgctttgccgggtaccacgtgctcaatggcaacggtgacgccaccggcctggaatgggtcagcgaagcggggctgctgaccacgccgctggccatcaccaacacccacagcatcggcatcgtgcgcgacagcctgatcgccctggaacgcgaacgcctggcggacccggcggtgtattggtgcatgccggtggtgatggaaacctatgacggcctgctcaacgatatctggggccagcacgtggggcccgagcatgtgcgcgaagcggtggacaacgccgaaaccggcccggtgcaggagggcgcggtcggcggaggcaccggcatgatctgccacgagttcaagggcggcatcggtacatcctcgcggcgcctgccggcggagcagggcggctggaccgttggcgtgctggtgcaggccaaccacggcaagcgccaggaactgcgggtggacggctacccggtggggcgccgcctgatggacattgcgtcgccgttcgcagagcaaggtacgccgggcatgggttcgattgtggtgatcatcgccacggacgcgccgttgctgccgcaccagtgccagcgcctggcacaacgtgcatccatcggcatcgcccgcaccggcggcggcaccgaggactccagcggcgatctgttcctggcgtttgccacgggtaaccaggatttgccgccggcggattacgggcgcaagggcctgccgttcagcagtgcattgcagatggtcaacaacgaccatatttcgccgctgttcagcgcggcggcggaggccgttgaggaggcaatcatcaatgcgatgctggccggggaggacatgctcaccgatcaaggtgcgcgcgtgccgggcctggacgccgacacgctgttggcggcattgcacaacaccggctggagtgtgtcccggaaataggggacacactaacttattactataaatagtggctgtttaatgttgccaatggcaccgtggcaatatattggatccattaatagcgaatgccgctcaacttgagcggcattagtgctatttaatatttaaataccgttgcggtgttttttgtcggacaacagcggtactccccaataaacagggagcggaacttacacggagtgtttgcctggggttttttagtgctggaaaagatgtagacgaaagatttcaagttgtgtcagttttcttacgccttcaaaagaggcgagtgataggacgatctcgcccgcggggttcctatcgatcaaagactgatgcacttgcaaacaaggaagtacgtttatgtcaaaagtaaaagacaaggctatcgtgtcggcggcgcaagccagcaccgcttactcgcaaatcgataccttcagccatctgtatgaccgtggcggcaacctcacgatcaatggcaaaccctcctataccgttgaccaggcggccacccagctgctgcgcgacggcgccgcgtaccgggactttgacggcaacggcaagatcgacctgacctacaccttcctgacctcggcctcctcgagcaccatgaacaaacatggcatcgcaggcttcagccagttcaatgcccagcagaaagcacaggccgtactggccatgcaatcctgggcggacgtggccaacgtcaccttcaccgagaaagccaccggcggtgatggccacatgaccttcggcaactacagcagcggccaggacggcgcggcagccttcgcctacctgcccggcactggcgcaggctacgacggcacctcgtggtacttgaccaacaacagctacacgccgaacaagaccccggacctgaacaactacggccggcagacccttactcacgaaatcggccacaccctgggcctggcccaccccggcgactacaacgccgggaacggcaacccgacctacaacgacgcgacctatggacaggacacgcgcggctacagcctgatgagctactggagcgagagcaacaccaaccagaacttcagcaagggtggggtcgaggcgtacgcgtctgctccactgatcgacgacatcgcggcgatccagaagctttacggcgccaactacaacacccgtgccggcgacaccacctacggcttcaactccaacaccgggcgtgacttctacagcgccacctccaatgccgacaagctggtgttctcggtgtgggacggcggtggcaacgacaccctggacttctccggttttacccaaaaccagaagatcaacctcaatgaagcctcgttctccgacgtgggcggcctggtgggcaacgtgtccatcgccaagggcgtgaccgtcgagaacgccttcggtggcgccggcaacgatttgatcatcggcaataacgcggccaacgtgatcaagggcggtgccggcaacgacatcatctacggcggcggcggggcagaccagctgtggggcggcgcgggcaacgacacctttgtgttcggtgccagctccgattccaagccgggcgcggcggacaagatctttgactttacctccggttccgacaagatcgacctgtctggtatcaccaagggcgcaggcctgaccttcgtcaatgcctttaccgggcatgccggcgatgcggtcctcacctacgccgcaggtaccaacctgggcactctggcagtggacttctccgggcacggcgtggcggacttcctcgtcaccaccgtcggccaggctgcggtcagcgacatcgtggcgtgatgcacgggcgcggcgcttcggcgccgcgccttacggatggagcatgaagatgcggcgtatgtttaatctgatcgcctgcgtgctgcaggtgatgttcgtgtcggcaggagcccacgcaatggcaagcagtctcgtattacctacctccgcccagttggccgggcattggcagttgcaccagcaggaccaggtctgcgcgctggacttgctggaacaggccaatgccttgggcggcgatgtggcgtgtgtcgccaactggttgggcgacaagcccctgacctggacgccaacgccggatggtatctggctgatgaatgccgaaggcagtggcattactcacctcaaccggcagaaagaaggtgaatataaaggccgcacgccgacgggcctcgaagttgtactgcaacgcgcaccttagttgccgttataagtaaataacttgatttcattagttgaccgctccgttagccggggctggggcaactattgcgcgcaattgggttcagggaagatcagaagctatggcgaagtcccatgccgtcgcgccgttattcaaggcgctgggtgagtacaagagtattttgatcagcattggctgtttcacggcattgattaacctgctgatgctggtgccgtcgatttatatgctgcaagtgtatgaccgcgtgctgtcctcccagaatgaaaccaccctggtgatgctgacgctgatggtcgtgggcttctttgcctttatcggcctgctggaggtgatccgcagttttatcgtgatccgcatcggcagccaactggagcggcgtttcaacttgcgcgtgtacaaggcggcgtttgaacgcaacctgcaacgcggccaggggcacgccgggcaatccctgggggatttgacccatatccgccaattcatcacggggccggcgctgttcgcattttttgatgcgccgtggtttcccatctacctgtttgtgatttttttgttcaacgtctggttgggtgtgcttgctacggtcggcgccgtgctgctgatcggcctggcatgcctgaatgaatacctgaccaaaaagccgttgggcgaagccagcggctactcccagcaatccacgcaactggccaccagccacttgcacaatgccgagaccatccaggccatgggcatgctcggcgcactgcgcactcgctggttcgcgctgcattctcagtttctcggcttgcagaacaaggccagtgacaccggttcggtgatcacctccctgagcaaatccctgcgcctgtgcctgcaatcattggtgctcggcctgggggccttgctggtgatcaagggcgatatgactgccgggatgatgatcgccggctccatcctgatgggccgggtgctcagccccatcgaccagttgattgcggtgtggaagcaatggagtgcggccaagctggcctatcagcgcctggacgacttgttgcgcgagtttcccccggaggtcgagcagatgaagctgccggcgcccaagggccaggtcagctttgaacaggtcagcgccggcccgcccggacggcgtatggcgaccttgcatcaggtcagcttcaacctcggcgccggcgaagtgctcggtgtgctcggggcatcgggctccggcaaatccaccctggcccgggtgctggtgggcgtatggccgacactcgctggcacggtgcgcctggatggcgccgacatccatcgctgggaccgcgacgacctcggcccgcacatcggctacctgccccaggacatcgagctgttcagcggtagcatcgctgacaacatcgcacgctttcgcgaagccgaccccgagcaggtggtgcgtgccgcgcagcaggccggtgtgcatgaactgatcctgcgtttaccccagggctacgacacggtgcttggggacaacggcggcggcctgtccggcggccagaagcaacgggtggccctggcccgcgccctgtacggcgggccgcgcctgatcgtgctggatgagcccaactccaacctcgacaccgtgggcgaagccgccctggccagcgccatcgtgcagatgaaagcccagggcagcagcgtggtgctggtgacccatcgttcgtcggcgctggcccaggccgacaagttgctggtgctcagcgacggtcatttgcaagcgttcgggccgagccaggaggtgctgcgcgcattgtcgggccagccggaaacgcccaaggacaaaccgggcgtgagtttcagtcgtcagtaccaggccacaaggaatccaggcgcatgagcagcatcacggttgaaccacgcttcaaagagcacgacgccaggtttttcgcgcgcatggggtggttgctgaccgtggtcggcgccggcgggtttttcctgtgggccagcctcgcgcccttggaccagggcatcccggtacagggtacggtggtggtgtcgggcaagcgcaaggccgtacaaaccctcagcccgggcgtcgtcagccggattctggtaaaggagggcgagcatgtgaaacaaggccaggcgctgttccgtctcgaccagacccagcaccaggccgacgtgcaatccctgcaagcccagtaccgcatggcctgggccagcgtggcgcgctggcagagcgagcgcgacaacctcgccagcatcgcatttcccaccgaactcagtgccgctcccgaccccgccctggcgttggtgctggaaggccagcgccaattgttcagcagccgtcgcgaagcctttgcccgcgagcaggccggcattcgcgccaatatcgagggcgcgaccgcacaactgggcggtatgcgccgtgcgcgcactgacctgaccgcccaggcgcaatccctgcgtgaccaactgagcaacctgcaacccctggccgacaacggctacatcccgcgcaaccggctgatggagtaccagcggcagttgtcccaggtgcaacaggacttggcgcagaacactggcgaaagtggccgtgtggaacagggcattctcgaatcgcgcctcaagctgcaacaacacagtgaggaatatcaaaaagaggtacgcagccagctggccgatgcgcaactgcgcagcctgaccctggaacagcaactcacttcggccgggttcgacctgcaacacagcgaaatcaacgccccggcggatggcatcgcggtcaatctcagcgtgcacaccgaaggcgcagtggtccgcgccggtgaaaccctgctggaagtcgtgccccagggcacgcgcctggaagtggaagggcacctgccggtgcacctggtggacaaggttggcacgcacctgccggtggacatcctgttcaccgccttcaaccaaagccgtacgccccgggtgccgggcgaggtcagcctgatttccgccgaccagatgctcgatgaaaagaccggcgcgccttattacgtgctacgcaccacggtcagcgaagcggccttggaaaaactccacggcctggtgatcaagccgggcatgcccgccgagatgttcgtgcgcaccggcgagcgttcgttgctcaattacctgttcaagccgctgctcgaccgcgccggctcggcgttgaccgaggaatgaacatgaaaccggtgtttatggccttgctgttcacctgcgcgagtgcccaggcggccatggggccgttcgatgtgtacgagcaggccctgcgtaacgatccggtgtttctcggcgcgatcaaggagcgcgacgccggcctggaaaaccgcgccatcggccgcgccggcctgctgcccaagctgtcgtacaactacaacaaaggccgtaacaactcccaggccaccttgccggacgggcgcggtggcaactaccacgacgaccgcaactacaacagctacggctccaccttcagcctgcaacagccgctgttcgactacgaggcctacgccaattaccgcaagggcgtggcccaggcgttgtttgccgatgaaagctttcgtgacaagagtcaggcgttgctggtgcgggtgctgacctactacacccaggccttgttcgcccaggaccagatcgacatcgcccgcgccaagaagaaggccttcgagcaacagttccagcagaaccggcacttgttccaacagggcgagggcactcgcacggacattctggaagccgaatcgcgctacgagctggccaccgccgaagagatccaggcgctggatgaacaggacgcgtccttgcgcgagctgggcgccttgatcggcgtacagagcgtcgacatccacgacctggcgccactgaaccaaggttttgccgcgttcaccctgaccccggccaactacgacacctggcatgagctggcgatcagcaacaaccccacgctggcctcccagcgccaagccctggaagtggcgcgttatgaggtagaacgcaaccgcgccgggcatctgcccaaggtcacggcctatgccagttcgcgtcaacaggagtccgacagcggcaacacctacaaccagcgctacgacaccaacaccatcggcgtcgaagtcagcctgccgctgtatgccggtggcggcatctcggcctctacccgccaggccagccgcgccatggagcaggccgagtacgagcttgagggcaagacccgcgaaaccctgatcgaactgcgccgccagttcagcgcctgcctgtcgggggtgagcaaattgcgcgcgtaccagaaggccctggtgtcggctgaggcgctggtggtgtcgaccaggcaaagcatcctcggtggcgagcgggtcaacctcgacgcattgaacgccgagcagcagctctacagcacccggcgcgatctggcccaggcgcggtatgactacctgatggcctggaccaagttgcattactacgcgggcaatctgcgcgataccgatttggccaaagtggatgaggcgttcggccctgcaaggggtgtaaatcaataataagaggggtaataccatgggtatctttgactacaaaaacctcggcaccgagggttccaaggcgttgttcgccgatgcgatggcgatcacgttgtacagctatcacaacctggataacggctttgccgtggggtaccagcacaatggcctggggctgggcttgccggcaacattggtcggcgcgttgctcggcagcaccgattcacagggcgttatccccggcattccgtggaacccggattcggaaaaagccgccctggaagcagtgcaaaaggccggttggacgccgctcagcgccagtgccctgggctacggcggcaaggtcgatgcgcgaggtaccttcttcggcgaaaaggccggctacaccacggcccaggtcgaggtgctgggcaagtacgatgatgccggcaagctgctggaaatcggcattggctttcgcggcacctccggaccacgggaaaccctgatcagcgattctatcggcgatctggtcagcgacttgctcgcggccctggggcccaaggactatgcgaagaactacgccggcgaagccttcggtggtttgctcaaaaatgtcgccgactacgccagcgcccatggcctgagcggcaaggatgtggtggtcagtgggcatagcctgggtgggttggcggtcaacagcatggccgacctgagcaacagtaaatggtccggcttctacaaggacgccaactacgtggcctatgcctcgccgacccagagtgccggcgacaaggtgctcaatatcggctacgaaaacgacccagtgttccgggccctggatggctcgtccttcaacctgtcgtccctgggcgtgcacgacacaccccatgcgtcgactaccgacaacatcgtcagcttcaacgaccactatgcgtcgacgctgtggaatgtgatgccgttttccatcgtcaacctgccgacctggatctcgcacctgcccaccggctatggcgatggcatgacgcgcatcctggagtcgggcttctacgagcagatgacccgcgattccacggtgatcgtggccaacctgtccgacccggcacgggccaacacctgggtgcaggacctcaaccgcaatgccgagccgcacaaaggcgataccttcatcatcggcagcgacggcaatgacctgatccagggcggcaagggcgtggactttatcgaggggggcaagggtaatgacaccattcgcgacaacagtgggcacaacaccttcctgttcagcggcaacttcggtaacgatcgggtgatcggctatcagcccacggacaagttggtgttcaaggatgtggcaggcagcgccgacttgcgtgaccatgcaaaagtggtcggcgcggatacggtgctcacctttggcgccgactcagtgaccttggtcggcatcgggcaaggcggcctctgggcggacggtgtgagtatcgggtgaatgatgcttatggcgttcagccagccaatcccccaggaaggcctggggtatcggctgaatgcagcggcgtggaaaatccttcggtaaataaatatctacctggttgtcgcgacggatcgctcggtgtgcctgcgtttaacgatcaagcgagccgtttcgcgtgatgacgtgggaggaaccgagcatgtgccgattgcgattgttgctgtgcgccctggtactgctggggttggctgggtgtgcggtgtacccggcgtattcgggcccgtgctgctatcacccgtactaccactcgtactattaccatccctactatcacccgtattaccacccgtattaccggtattgaccgggcgacaatgcaaaaaaagccccgcactgcggggcttttcattgttatttttctttgatcaccgtcgcgacatcggcagccttgacccgtacccgcttaccggcgatgtcggtgaattcgtagaagccatcggcggtcttggcgtttggggtgtccttggtcaaatactgcgtgccattttgcagtgtcactacggtttgcgtcgcgcaaccggccaataccagaaaagtgagtgcaaccagcggcagacccaaattcttcatgttcataacccttaccttgactttgaaaagtcccgcgccagaggcggcgggcgacaaatgttacgccatcgattctcccatctgatcgcttttatacaaaaagttgcaggcgccatttatctattaccgattgcaacaccgcatttggagcggcactctgtatgcataaccagtattcgatcagcgcgtgaaatggccaatcccctcgacgatcccctgtattacctgcataacttccgccaagtgctgctctggctggggcagcgctatgccgatttgctcgacccggacgaacagcgttttattcagcaatttgacaggttgccgcaggcgtcccaggcgcttttggtgcgcatggtgatgcgcaagggcgtgcactttcgtgcgggcaagctcaattacctggagattggttgcccccacgccgctgccgggccgctgatggaactgggttgggtggacgatcagtacctgctggcctttgaagagctgttcgccgtgctgcaaaaaggtgaaatcctggccactttcaaaccctggatcgagcagcccaaaggcaagaaaaccgattggctggaagggttgtcggcacaattcaccgacagccgcagctttgccacctggtgccccgacctggccgacaggttgttcagcctcaccgtgatggaactctgcgaccgtctgcgcctgatgttcttcggcaacctgcatcaggactggtccgagttcgtgttggctgacctgggcatctacacctatgaaaaagtccagttctgcgccgaatcccgtggtttgcgccaccgtgacgatgtgcaggggtatctgttcctgcaccaatgccagcaggcgtacgaggccggtgagccgctggaagatgtactggccggggttgccacgctggacaccgataacccctggctggagaaacgccgcgccaagttgttgtttcagatgggtcaatattgcgagcgtactgccgagctggccctggcggagcggatttaccggaactgcacctaccccggtgcccgctcacggttgatccgcgtgctcgagcgccaggaggattacgcccacgccatggccctggcgaacaccgcccaacaggcgccggaaagcgccgccgaacagcagcacttgctgcgcgtcatcccgcgcctgcgccgcaaactcggcgagccggcattgcccaaggtcaagccacgaccgttgacgcgcctggacctggccctcacgctgccggaacccttgatgtcggtggagtactgcgtgcaggcgcacctcagcgagccggatgggccggtgcactacgtggaaaacggcctgatcaattcgctgttcggcctgctgtgctgggaggtgatttttgcgccgctgccgggttcgttcttccacccgttccagcgcggccctgccgacctgcacagcgcggattttcaccagcgccgagcgccgctgttcgacgcgtgtttcgagcagctgcaggacgagcgctacaaaaccactatccgccaacgctaccgcgacaaatggggcatccagtcgcccttcgtgttctggaacctgctcagcgaagagctgctggagcaggcgctggcctgtttgcccgccgagcacctgcgctactggttcgagcggctgctgctggacatccgcgccaaccgcgccggcatgcccgacctgatccagttctggcccgcgcaaaagacctaccgcatgatcgaggtgaaaggccccggcgatcgcctgcaagacaaccagctgcgctggctggagttctgcggcgagtaccagatgccggtgacggtctgctatgtgcgctgggcaccacccgcttgagctacaccgtggcggtgcgggcgctgtgcgaattcacggccaaggtcggtgacctcgacctgcgcttcacgccgtcgccgagcgcccaggagggcatcgccggccaccgcaccgtggcctcgcggcgcagccagcactaccagaatgaagtggcgctggagggtcaataccagcagctcacggtgcggggcagggcggatggctatgacccggacgccaatcgcctggaagaagtgaagacctatcgtggtgacctcgatgcgcagcccgccaaccatcggcaattgcactgggctcaggtcaaggtgtatggctggttgatgtgccagaaactcgggctcccggacatcgacctggcgctggtgtacttcgatatcgtcggtgagggcgagacgctgctcaatcaacgcttcgacgccagcgacctggaagcgttcttcaaccagcaatgcgcgctgttcctcggctgggccgagcaggaaatgcggcaccgtgaagcgcgcaacgccgccgcgcaaaccctggcgttcccccatgcggattttcgccctggccagcgttcactggccgagtcggtgtacaaggcggtcagcaccggccgctgcctgatggcccaggcaccgaccggcatcggcaagaccatcggcacgattttcccgttgctcaaggccctggcgccccagcaactggacacgctgttcttcctcaccgccaagacccccggccgcaaactcgccctggacgccgcccaagtgttgtatgccagccgccctggcttgccactgcgcgtgctggaactggtggcgcgggacaaagcctgcgagcacctggacaaagcctgtcacggcgagtcctgcccgttggccaaggacttctacgaccgcttgcccgccgcgcgcatcgccgcgtccagggtgcgcctgctcgatcagcgcaacctgcgtgacgtggccctggcccatcaggtctgtccgtactacctgagccaggaaatggcgcgctgggccgacctggtggtcgccgactacaactactactttgactttggcgccatgctgttcagcctggcccagctcaaccaatggcgcgcggcggtgctggtggacgaggcgcacaacctggtcgaacgggcgcgttcgatgtacagcgccagcctcgaccagtaccacctcaagaccctgcgtgacagcgccccggagccgttgaagaaacccttgcagcgcctcaaccgtgagtggaacgcgctgcacaaggaccagctcgcgccgtaccaggcctacgccgtccgcccggacaaactgctgcaggccctgagcctgtgcgccagcgccatgggcgaatacttcaacgagcatccggagtccctcagcggcgacctgcaaaccttctatttcgacgtgctgcaatttgccaaggtggcggagctgttcaacgagcacttcattttcgacatcagcaagcgccagctcagcggcaaacgcagcagttccacgctgtgcctgcgcaatgtggtgcccgccgaattcatccgcccacgattgacggctgcccgcagcagcgtgctgttttccgcgaccctgagcccccggcattactacgccgacctgctgggcctgccggccgacaccgcatgggtcgacgtggaatcaccgttcaaggccgagcaattgcaggtgcgcatcgtcgatgaaatctccacgcgcttcgtgcatcgccacgcttcgctggagcctatcgtcgagctgattgcgcaccagtacacgcaacaaccgggcaactacctggcgtttttctcaagcttcgattacctgcaacaggtcgcgcagctgctggccgagcgacatccgcagatcgtgctgtggcagcagtcacgcggcatggccgaggccgagcgccaggcgttcctcgaccagttcaccgagcacagccagggcatcggttttgccgtgctgggcggcgcttttggcgagggcatcgatctgccgggggcacgcttgatcggtgcgttcattgccaccctcgggttgccgcaactgaacccggtgaatgaacagatgaaactgcgcatgggtgcgatcttcggcgcgggctacgactacacctacctgtatcccggcctgcagaaggtggtgcaggcggcgggccgggtgatccgcagccagcaggaccggggcgtggtgatgctgatcgatgaccgtttcggagaaggccgggtacgccagttgttgccgcgctggtgggcgctggcgtgagttattcctgctatcaatgatgctggcgccgtggccggcaatcgcgcacgctggcaaaaacctggaagaaggcgatgcccatgagccagcagatcatcagcgtcaacggtattgagttgagtgtccacattgtcggccctgagcagggcacgccgatctggctgctgcacggtttcccggagtgctggcactcctggcgcgagcagattcccgcgctggcggcggcgggctatcgggtatttgccccgcaaatgcgtggctacggccattccagcgcaccggccgaggtggctgattacgacgtgctgacgctatgcggcgatatccagcaggccatggaccactttggtcattcccaggtggtgatggtcggccacgactggggcgcggtggtggcctggcacctggcgttgctcgaacctgaacgggtcacgcgcctgatcacgatgtcggtgccgttcgccgggcgagcgcggcggccggtgatagaaatcatgcgtgagctgtacgccgaccgtttcaactacatcctgtatttccaggaacccggcgttgccgagcaggaattgaacgccgatatcgaacgcacattgcggctgttcatgcaggatcaggatgtgtttttgcaacgcaaaccggcgaatgccaggttgcttgaaggcgttccagcacccggcgcgttgccacactggtgctcccaggcagacctcgacgtctacgtgcaaaccttcgccgagcaggggtttcgcggcccgttgaactggtaccgcaacttcgagcgcaattggcaacgcacggaacacctggcgggcaagcaggtgctgcaacccacgttgttcctgatcggcgaccgcgacccggtcggggtattcgaggcgcatacgctcaagcgtatgccggactcagtacctcagcttgagcagcacgtgctgcccaactgcggccactggatccagaacgagcaggggcaacaggtcaacgcgctgatgctcgggtttctaggcaaaacgtaaaggtcgcacctcggccggggcggtccaccaggctgatgctgcgcccgtgcagttgcaggatgcggtgcacgatgcgcaggcccaaccccccgtcgcgccgggcgccaccaatggtgaatgcgcgcaggaacaagccttcgcgtaattcagcgtcgatgccaggcccgctgtcgctgaccgtgaccgctaccgcgtgtgcttgaggcgacaggatgacctcgatttcgccattcaccggtgtgtgccgcagggcattgtccaacaggttggtcagcacccgttcgatcaaccccaggtctgcctgcaccgtcggcacctgcggcggcaggctcgccgtcagcgtgatgccgcgtgcttcggcggtgagttcgaatttctggaagatgtcctgcaccaggtcgggcaatgaaaaaccttcgatcactggctgcacaaagccatgctccaggcgtaccagttccagcagcgattgggccaggccgccgactttgcgactctggtccaaagcaatccctaggtagcgacggcgctcttccgggctgaggctggcgtccttgagcgagagggtttccagatagccatgcaaagaggccagcggtgtgcgcaggtcatgggagatattggcgaccatttcccggcgttcctggtcctgatgggtgatggcgcgccattgttcgcccaggcggttctccatttgcatgaaggcctggtccagcaccgcaatctcatcgccgctggtgagtggcggtgcggtggtttctgccggtttgggcgcgccattgatgtcgaactggccaaccttgtcggtgagttgacgcagcggccgggtgatccaggcaaacgcgatcaggccggccatcaggcagagcagggcgaccaggccgatggaccacagggcaatcttcaaggccatgcccgtggcgtccttggcgtcgtattcatcgtgggcttctccgagcagcaccacatacaggaatccggtctgcttaccgccggccatgaggggcgcggcgctgaataccttgcgcccatcgacgctgcgcgggtcgtccccgaggatcggcagcatgaagcccgccaggaagcgccggatgggcgccaggtcgaccttgtcacgcagcaggtggccgctgggcgcggcattgccgaccacacggccatcgatgtcgagcaggtacacctcgacgctggggttgaccagcatcaactggctgaacaggttgcgcacggcgtcgggcttgaggccatcagcgtccatcagttgggtgtcgcgggcgatatgcgccgcgagatcgcgggacaggccttgcaccacttccagctcgtgcatgtggttggaacgcacctgcagccacgccgacgtgccgctgcagatcaacagcaaaaccgcgaacaccagcgacaggcgctgggtgagggtgagcttcatggcgggctctcggcaaacttgtagccacggccccacaccgtgaggatgcgcgccgggttggccgggtcggcttcgaccttggcccgcaggcggttgatgtgggtgttgaccgtgtgttcatagccttcgtggctgtagccccacaccgcgttgagcaagtccatgcgcgagaacactttgcccggctggcgcgcaaagaagtacagcaggtcgaattcccgtggggtgaggtccaggcgctggccttgcagggtggcatcgcgggtcagcgggttgatgaacaattggccaaggtcgaggctgccggcgtccatcttcaggttacgcgccatggcgtcgacccggcgcagtaacgccttcacgcgggcgaccagttccggcatggaaaacggcttggccaggtaatcatccgcgcccagctccaggccgaggatgcggtgcagttcgctggagcgtgcgctggtgatgatgatcggggtgtagcgcgtcatggcgcgggcgcggcgacagatctccagaccgtcgacgccgggcagcatcaggtcgaggatcagcgcatcccagccgccttgctccagcaggcgcaggccttcgttgccatcggtgctgtgcaccacctcgaactgttcgtcacgcaggtgcaggcagatcaggtcggcgatatgggcatcgtcctcgaccaccaggacacgtttgggctgatccatgtaagagaaaccttcgcttgtagttcgcgcattgtgcggcttttgcaacagtgtagttatcacgaattgtttaactctgcgtgaggattccgcgaccgtaaacagcccaagattccctcacttcaaagagggaaagcaccatgtactcacgccgacaaatactcctggccagtggcggcctgggtgtcgccgtcctggcgggcggcctgctcaagcaactcagtatggtcaccgaagccgaagccgccgaaaccttcgaggtcagccacaccgacgcgcaatggcacagcctgctcaccgacgagcaatacgccatcctgcgcgaggagggcaccgaacgcccctacagcagcgcgctcaacgatgaacaccgcgccggcaccttcgcctgtgccggttgcgcgctgccgctgtttgcctcgaccaccaagttcaacagccacaccggctggccgagtttctggcagccactggacaacgcggtggccagccataccgatacgtcctacggcgtggtgcgcaaggaaatccactgccgccgctgtggcggccaccaggggcacgtgttcgatgacggcccgccacccaccggcctgcgctactgcatgaacggcgccgccatgacgttcacggcggcgtaagccgatgtctatttcttataagggtccatcccatgtggcttctggttctcgcgtacctgggcggcgtgctgacaatcgtcagtccgtgcatcctgcctgttctgccttttgtcttcgctcgcaccgggcagccgtttttgcgcagtggcttgccgctgttagcggggatggcggtgacattcgccctggtggcctcgctggcggcggtgggcggcggctgggtggtgcaagtcaatcaatacgggcgctggctcgcgttgctgtgcgttgccctgttcggactcacgttgttgttgccgcaactctcggagcgcctgacgcgcccactggtagccgccggcagtcgtttgtcggaagccgccggggccgatgccaggccgcgtccgggcgcgtcgttcctgatcggcgtggccaccgggctgctgtgggcgccgtgcgccgggccgatcctggggctggtgctcaccggtgccgcgctgcagggcgccagcatcggtactaccttgctcttgctggcttacgccgccggtgctgccacctccctcgcgctggcgttgctggtcggcggtaaagtctttggtttcatgaaaaagtccctcggtgccggcgaatggctgcgccgtggcctgggcgcgctgatgctggccggtgtggccgcgattgcgctgggcctggacacaggcgtgctgtcgcggctgtcgaccgcgtccaccggtggcctggaacaaagcctggtggatcgcctcagcgccaagccggcgcagcccggcggtgcgatgatgatggccgccaatcacagcgacaccttgccgatcgaaggcgcgctgccatccctcgatggcgccgtgcaatggctcaacagcccgccactgaccgccgaagcactcaagggcaaggtggtgctggtggatttctggacctactcctgcatcaattgcctgcgcactctgccgtatgtaaaggcctgggccgaaaaataccgcgaccagggcctggtggtgatcggcgtgcatgcgccggaattcgcctttgagcgcgacgtgaacaacgtcacccaggccatgaaggacctgggcatcacttacccggtggccatcgacaacaactacaagatctggcgcgcgttcaacaaccagtactggccggcgcattattttgccgacgccaagggccagattcgttatcaccacttcggtgaaggcgactacgccgagtcggagcgagtgatccagcagttgctgcgtgaagccggcgcgaagaacgtcgcgggcggtttgatcgaggccgatgccaagggcgtgcaagaagcgccggacatgaacgaggtgcagtcgccggaaacctacctgggttcgcagcgcgccgaaaacttcgtcaagtccggccccctggcactcaataattggaccctgcaaggccaatggaacgtcggcggccagcaagccaccctcgaccaggccggtgggcgcatcgtctaccgcttccatgcccgcgacctgcacctggtgctcgccccgggcgccgacggcaaaccggtgcgtttcaaggtcacgctcgacggccaggcgcctggcgatgcccatggcaccgacgtcacgccggatggcagcggcaccgtcaccgaacaacggttgtaccaactggtgcgtcaaccgggtgccgtgcaagaccgcaccttcaccattgaattccttgaccccaacgtgtcggcgtatgccttcacctttggttaacccggagtgcctgccatgaatgtattcaaatacctgcccgtgttggccttcgccgcgttcgtcggccaaagccaggccttttccttcggcgccgccgccgacgccgtagtgatcgcgccacccgccctggacctgcccgccgaagccggcaacctgcaaaccgctgtgttcgccgggggctgtttctggggtgtgcaaggggtgttccagcatgtgcaaggcgtgaaaaacgccgtgtccggctacgatggcggcgccgcaagcacggcgcagtatgagtccgtcagcgacggcaacaccggccacgccgagtcggtgtcggtcacctacgacccgagcaagatcagctacggcaaattgctgcaaatctacttctcagtggcccacaaccccaccgaactcaaccgccagggccctgacaccggcacccagtaccgttcggcgatctttgcgcagaatgccgaccagcaaaaagtcgcccaggcctacattgcccagctggatgcggccaagtccttcgacgcacccatcgtcactaaaatcgagatggacaaggtgttctacccggcggagtcctaccatcaggacttcctcaccgagaacccgtcttacccgtacatcgtgatcaatgatctgccgaaggtggcgcagctcaagaagcttttccccgaccagtaccgcgccgagccagtgctggtaaaacaccagtaaccggaatgtgggagggggcttgcccccgatagcggtgaatcagtccccgaattggctgactgacccactgctatcgggggcaagccccctcccacattgtttaatcccagtggacgttagatgacctccaggtacgagctgtgaatcgcccgcgccagctcgcgcacggtgtcgataaattccgtaagacggctgtgcaggccgtcttcaaggatttcatcaatccccgtataccgcagccgcgcctcgaactccgctgccaggcgctgcgccgtgcgcccataactgccgggcaggtccgcgaggatatggctcaactcctcgatgcacgcatgcaacgagcgcggcacatcgctgcgcaacagcagtaattcggacacggaacgggcattcaacgcgttcggatacagctccgtgtacgcctcgaacgacgacaacgcacggagcagggcgctccactggtaataaccgcgtgccgacaaatcactgacttcttccgattcctcgccgaacatctcgtagcgcgcatccagcaaacgcagggtgttgtcggcgcgctcgacaaaggtgccgaggcgaatgaaccgataggcgtcattgcgcatgatcgtccccgaggtggcaccacgaaacaggtgcgaacgctgcttgacccagtcacagaagtggctgatgccatgtcgcgccaggccgccggcggcgatactgcgcatttccagccaggtggcgttgaggttttcccacatgtcggcggtgatgcgtccgcgtacggcgtgggcattgccacgggcggcgcgcaggcagttgtagatgctggcggggttttcttcgtcgagggcgaagaagtgcagcatgcgctcggcatccagctgtttatgccgctcaaggtagctgtccagggtgccgctgctgagcaacgacatggccagttcgtccagaccgtcgctgcgcccggcttgtggcatcaacgacagcgagtaactgacttcgagcatgcgcgccaggttttcggcacgctccaggtaacgggacatccagtacagatctgcggcggttctactcaacatactcagccctccaccacccaggtgtccttggttccgccgccttgcgacgagttgacgatcaacgagccttccttcaatgccacgcgggtgaggccaccgggcaccaggcgggtttccttgcccgacagcacaaagggccgcaggtcgatatgccgtggggcgatgccgttttcgacgaaggtggggcaggtggacaggctcaaggtcggttgggcgatgtaggcatgggggcgggccttgatgcgttggcggaagtcctcgatctcggcggcgctggaggccgggccgaccagcatgccgtagccgccggacccctgggtttccttgaccaccagttccggcaggtgggccaggacgtgggacagttcatcgggcttgcggcactggaaggtcggtacgttttgtagcaccggttcttcgtctaggtagaaacggatcatttccggcacataggggtagatcgacttgtcgtctgccacgccggtgccgatggcattggccagcactacgttgccggcgcaataggccgcgaccaggccgggcacaccgagcatcgactcggggttgaaggccttggggtcaaggaaggcgtcatcaatgcgccggtaaatcacgtccaccggcttggggccgtcggtggtgcgcatgaacaccttgaggtcgtgcacgaacaggtcggcgccttccaccagttccacgcccatttcccgggccaggaacgcatgttcgaagaacgcgctgttgaagcgccccggcgtcagcaccaccacattggggttgtccaggcggctggagctcttgagggtcttgagcagcaggttggggtagtggtccaccggcgcgatgcgttgcttggcaaacacctcggggaacaggcgcatcatcatcttgcggtcttcgagcatgtagctgacgccgctgggggtgcgcaggttgtcttcgagcacgtagtaggtgccatcgccgtcacgcaccaggtcgacaccggagatgtgcgagtagatgtcgcgatgcaggtccaggccgaccatggccttctgatagccctcgttacccagcacctggtccgcgggaatgatcccggccttgatgatgcgctggtcgtggtagatgtcggcgaggaacatgttcagcgcattgacgcgctggatgcagccgcgctcgatcacgctccattcactggcagggatgctgcgcgggatgatgtcgaaggggatcaggcgctcggtgtcttgttcgtcgccgtagagggtgaaggtgatcccggcgcggtgaaacagcaaatcggcttcgcggcgacgctgggccagcagttccggcggcgtattcgccagccagcgggagaagtcctgataatgcgcacggcaggcgccgtttgcgtcattcatttcatcgaagaaagatcgagccattccagtaccttgtcagtgccgagggacgcttgggtggcactgccgtttcaaaaaacgcattttttatgagcccgtggctaagggtgccactgggcctggtccttactttcttgtggggtcggctctgggtcggggggtaacgaatgctcctgtatccgggcagatgaatggataaagcaatgcctgtgccgaaaccgcgaatcttgtggtgagcgggcttgccacagaagcctgttcaccacagaaggccatcaccccaacaagcccgctcaccacaagagggcagcggcttgaaggtgccccgacttggtgcatgaacaaacttgaacttcactcgccaccgactcttctaacaggactcgaacctgctgggagcaccgtcgtgcccagaatcatctctccccatacgccggaagcggccctgaccgaccacagcgaacacaacgcgaagatcttcggttcgcccaaggaccggttggacttctaccggcgcgaaatccagtacgaaaccaccatcctggccaaccgcaccgacgcctacctcaccgcgcagtcattcctggtgatcgccttcgtctccggcatgggtaacctcaaccctgagtggggcaagctgttcaccctggtggtgccggtgttcctggtgatgctcggcgtgctcagctcgttgaatgcctggccggggatccgtgcggcctacgagatcatcgaccattggcactacaaacagagtgaactgctgcgcagcgagccggtgatgggcctggcctacgatgagtcaccgttgttttccgagatggagtcgtcccacaagggctatcgcaagtcgctgctattctcaatgcgagcgccctggctgttcatggtgttctggctgttgctgggggcgtacgcgttctatattcaggtggataaccctggctcataaccgaggagagcgtcatggcaaacgactgcgaggaagaagaaccgaatgacccgggcaacgaagacccgggttccttgatggacgatgcaaccgtgccgttgattgaccaggagggtgacgctaccgagccgccggattgaagcctattcgatcaactgtttgccgatggttttcatccggatcatgtccatcaactgccgcagccctggctgcgactgccgtcggctcgggtagtacatgcacaacggctcgccctggcaggcccagtcgggcatgacctccaccaggcggccgtccttgagctcctgttccacgcggttggacaggcagtaggcgatgcccaccccttgcagcgccgcattcacaatagtctcggtatcagccgcgctgaagtggcccggcacgtcgatgcgttgctggcgggtgccgttgcccagttcccacttgtaggtggtcttgtcgcccaggtacatgcggatgcaggcgtgttgcagcaggtctttgggcacctgcggcgtgccccggcgggccaggtaggcgggcgacgcgaccacgatccagcgcagctcaccggtcaagggcaccgccaccatgtcctggggcacggtggcgccgtagcggataccggcgtcgtagccctcggcgatgatgtcgatcatctggtcctgcacgatcaggtccacgcgcagttgcgggtaggcggtgcagaagtccccgaggatcggcgccagcagcaataccgccgcgtcccgtggcacgttcaagcgtagccggccaatgggcgcgtcgcggtacaactccagggtgtcgaggccgtccttgatggtggcaaagccctgggtgagtttttctgccagcagcgaaccggcatcggtgggttccacggcacggctggtgcggtacagcagcttcacccccaggcgggtttccaggttgcgcatggtgtggctcaaggccgaggtggtaacgcccaactcatgggcggcgtggcgaaagctgcggcgacggatgatagccatgaacacgttgagatcggccagttcggaacggttgaaagcagccattttcaagcctcttatgcgggagttcggctgtatgcggcgttgagcccgattcaaccgtggatgacttagagtaattgtttttctaagcattattgcaagccacgagatattttcatgcgcgttgagaccatcagaattgccggcatcgaacaggcggtctcgcggatcgccctcggcacctggtccatgggcgggcacctgtggggcggcgcggacaccgagcaagcctcgcgcaccttgcggcacgcgttggcggtgggtatcaacctgatcgacaccgcgccggtgtacggctttggcctgtccgaagagctgatcggcaaggccttgcgcggcgtgcgccacagcgccgtgatcgcgaccaaggcggggctgcaatgggacaccggcgccatccggcgcaacgccacggcccagcgcattcgcaaagagctcgaaggttccttgatacgcctgggaaccgactacatcgacttgtaccaggtgcactggcccgatccgttggtagcccaggaagaaaccgccgatgaattggagcgcctgcgccgtgagggcaagatcctggcggttggcgtgagtaattattcctcggcgcaaatggacgatttcagccagtacaccgccctggccacggtgcagccaccgtacaacctgtttgaacgtgccatcgacagcgacatcctgccctacgccaaacagcattcgctggtggtcctggcctacggcccgctgtgccggggcttgctcagcggcagcatgcacacagccacgcgctttgccggcgacgatgtgcgtacgctcgaccccaagttcaagccgccacgcttcgagcaatacttggccgccgtggccgcgctgagtagctacgcccgcgaatgccacggcaagtcggtgctcgccctggccctgcgctgggtgcttgaccaaggcccgaccatcgcgctgtggggcgcccgccgcccggagcagctgaagggctatcaagaagccttcggctggcacctgacgcccgaagacctgtcgcatatcgaccgtatcctggccagcacgataaaagatcccatcggcgcggaatttttagccccgcccaagtgttgacccttcgacagggatgtccaggtttttgcatgaagcgcggcacctgatgaacccgctgtaactgtcagccccgtagaacaggtgataagcaccctgtggcgagcaggcttgtcctgcgttgggttgcgaagcagccctgaaacccgcggccgaagcgtgcctgactcagcgcattcctctttccagggtcgcttcgcaacccaacgcgggacaagcccgctcgccacagttgcagtgctcgccctccaagactttgaaagggctggttgtaaatgtgcggaaatcgccataacgacctctttggacgataaacgacaccgggccaaacatgcccattgaacgactgttcagtttgcactatgttgaccgcatccacccgtttggaaccgaacgggttagcgctttttcttcttgaacgagaggctctggcatgcggttttcccccttcgtcgaacgaattgcagggcagggcgtagccgcctgggacatccaccacgccgcgttccacgccgccagtcagggcgaagacatcatcattctcagcgtcggcgacccggatttcgccacgccgtcctttatcaccgacgctgccgtcagcgccttgcgcgatggcgacacccactacaccgaaatccctggccgcccggcactgcgcgaagcgattgcagcacgctacagccagacgctggcacgcccgctcgatgccgcaaacgtcatcaccgtggccggtgcgcagaacgccttgttcgtgacgtcgctgtgcctgttgcaggccggtgacgaggtgctggtgctcgacccgatgtacgtcacctacgaagccacgctcaaggccagcggcgccacactggtgcgcgtgccgtgttcccctgagtcgggctttcgcgtcgatgccgcgttgctcgccgccgcgatcaccccgcgcacacgggcgattttcttctccaacccgaacaaccccaccggcgtggtgctcaacccgcaggagctgcaagccattgccggcctggccatcgcccacgacctgtgggtcgtggtggatgaggtctacgaaagcctggtgttcgacggcgagtaccacagcctcgctgcactgccgggcatggccgagcgctgcgtggtgattggcagcctctccaagtcccatgccatgaccggttggcgcatcggttggctcatcgctgcgcccgcgctgatcgcccatgccgaaaccctggtgctcagcatgctttacggcttgcccggctttgtgatggaagccgccaccgccgccgtgctggcccatgatgaagtgacccagggcatgcgcgagatttatcggcgccgccgcgacctggtggtggccgggctgagtgcctgccctggtatccaggtgcgggcgccgcaagcggggatgttcgtgctggtggacgtgcgcggcaccggcctgggctccctggattttgcctggcgcctgtttcgcgaagcgggggtatcggtgctggatgcggcggccttcggcgagcccgcgcaaggtttcgtgcggctctcgttcaccctcggcgaagaacgcctggcgcaggcctgccaacgtatcgcgcagtttgtcgccaagctggccggtgagccacgtatcgccgccgcgcccagggttgaagtggcgcaacctgtcgcagccaggaagatgatcgaggtcatcgacctgcataagcgcttcggcaatatcgaagtgctcaagggcatttccctcacggcccacgaaggcgaagtcatctcgctgatcggtgccagcggctcgggcaagagcaccttgctgcgctgcatcaacatgctcgaagtgccggaccagggcagcattcatgtagacggcgaaagcatcaagctcaactacggccgccccggcgcacccctggtggcggatgcccggcagttggtacggatccgctcgaccttgggcatggtgttccagaacttcaacctgtggccgcaccgcaccgtgctggaaaacctcatcgaagcccccacccaggtattgcgcgaaagccgcgccgaggccatcgaacgtgcagaaagcctgctcgaccgcgtcggcctggccgccaagcgcaatgaatacccggcctttctttccggtggccagcaacagcgcgtggcgattgcccgggcgctggccatgcgccctaaagtcatgctgttcgacgaacccacttcggcgctcgacccagagctggtgggcgaagtgctgcgggtgatccgctccctggccgaagagggccgcaccatgatcctggtcacccatgaaatggcattcgcccgggatgtgtcgtcgaaagtggcgttcctgcaccaaggcatgatcgaagaaaccggttcgccggacgcggtgtttatcgacccacgcagtgaacgttgccgacagttcgtcaacgcgcaccaaactcgctaactccagaaaaagacggggcaacatcatgcaattcaaacgtatggcaacgtggttgagcagtgcagtgttgatgctggccgcaggtttcacctgggcggccgacaagcccatcgtgtttgcggtggcggccgaaccctacccgccgtttaccgtgaagggcggtaacggccagtggtccgggttcgaggtggacctgatccacaagctctgtgaaggcatgaaagccgaatgccagatcaaggaagtggcgtgggacggcatcattccctcactgctggcgaagaagatcgacgtgattttctcgtcgatgtcggtgaccgacgagcgcgaaaaacagatcgcgttcagccgcgcctactacgattccctgctgggagttgcggggccaaaaggcagtgaagtcgagatctccccggcgggcctcaagggcaaattgatcggcgtgcagatctccacggtcagcgccaattacctgaagaagtattacgaaaacatcgccgacctcaggtactacgacacccaggaatcggccaacgccgacctgatcgccgggcgtatcgactacatgatggccgacgacaccgccatcgccatgatggtcaagaccccggaagccagcggcctggcgcacatcgccagcgtgccctacgacccgatcatcggccgtggcgtcggtgccggcctgcgcaaggaagacaccgcgctcaaggcccggctggacaaggccatcggcgagttgctggtgagcaaggactacgacgacctgtcacagcactatttcggcctgtcggtcagcccgtgcaagcgcaccgataccccggcgtttgtgagcaagacctgtgacagcccgtaccagcaaatcgcccagaagaccgaataaccatgttcgaccttctcggtttcggcgaacaagggtggggccaggcgttgctcaaggggttatggatgaccctgcagatctccgccgggtcatttgcggtgggcttgctgatcggcctggtggtggcctgcgccaagctcagcgcgccgcgtcccatcgcgctgctgatgcgcggctacaccacggtgtttcgagcggtgccggaactgctgctgattctgctgctgtactacgccggctccatgggcctcaacgcgctgatgctgtggctgggcttcgcccaggtgaatatcagcggcccgctggtggcgatcctggtgctcgggctggtgcagggcgcctatgcctcggagattttccgcgcggcgatcctggcgatcccccacgggcagatcgaagcggcgcgggcctttggcctgagcgggctggggctgttccggcgggtgacgctgccgatcatggcaccgttcgccctggccggcatgtccaacctgtggatcaacctgatcaaggacagtgccttgatcagcgtggtcggcaccaacgaactgctgtacaccgccaagcaggcggcggggtcgacccgccaatacctgctgttctacctcgcggccgccgccttgtattacctggtgacgctggcttccaactacctgtccgggcgcctggagcgccgtatccgtcgctggatgccggttgtcgagtgaggcgcacatgcctgagtggataagctactacgccgggctgatcgccaaggggttgcagaccaccttgtcgctgctggtgatttcggcagtactcggttttgccctggcggtgctggtggcgctggcacggttgtcgcggcgcaagtggctggcgcgcagtgcgctggcctacaccagcgtgctgcgcggtacgccgttgctgatccagatctacattttctactacggcttgggcagcctgttcgcccagttcccgatgatccgtggcagcttcctgtggccgtatctgcgcgatggctactggtacatcgtgtttgccctggtgttgtcggtaggcgcctatgtcggcgaggtgattcgcggtggcctgctggcggtgcccaaaggcgagatggaagccgcctcggcgttcggcatgaccccacgccaagccttgttgcgcgtgcgtttgccacgggcgatgcgtctgttgctgccgaccctggccggggagacggtaatgctgctcaaatccaccgcgctggcgtcgaccattgccgtggtcgacctgctcggcgcggccaacgtggtgcgcgcgcagaccttgcagatctaccagccgctgctgctggtggcgggcgtctacctgtgcctgaccttcctgatcgaaggcgtctacgccatcgccgaacggcgcggtacgccgctgcgcaggtcggccggatgagccggtgtcacaggatgtgatcggcgctgaaggcaccgtgacgcaagccttgtacccagcagcggcagatgtgcaacccgttggcagggctgaaggtgccggggttgaggcagccctcgagccagagtccgtcgagcatcgccgataggccaatggcggccaggtggctgtcgtggatcagcaggctttcactgcgggccaggtcgtccaacaggcgttggatcagccccaggtaggcgtggtaactgttttcgtgggactggttaacgtggggcgagtggcggatcaggctccagaacaccacccacacgccgagcaggtcggggtccatgacccgtggcgagaacgaggcactgagaaacgcgtccagccgtgcggcggcgccgtcagccagttcgacctgttcccacagggcagtggtcagctcgttggccagcttgtggtaggtctcggcaatcagcgcgtcgatgctgccgaaatggtggttgagcaagcccaccgatacaccggcttcggaggcgatgcggcgcacggaaatcccggcgtgcccgtcgcgggccaggcaggtgagggcggcggcgatcagcaggtcgcggcgctcgtcggggtcggcacggcgcagtttgtgagggtcgacggtcatggacaggcctttgatggaaacaccacagcgctaaggttagttgaacgtatgttcaatctctagcggttaatgaatgagaggagggcaaggcatggcaaacgacctttcgtggcaggtcatcggcgacgccggcaacccgctgcacattggcgcctggcgcttcgaaggcgacggcagcgggccaagggtgcacctgcaggcgggtgtgcacgcggatgaaatcgccggcatgctggtcctgcatcagctgttgccacgcttgcaggcgtgtcaggaccaaggccgcctcaagggcagcgtcaccgtggtgcctcaggccaacccgttcggcatcggccagttccgccagggccgtttgctggggcgctttcatgaagccaccgggcagaacttcaaccgcgctttcgatcactccctggccatggcgcagccggcgagcaacctggcgcagtggcaaaaacgcctggtgcaactggccgctgaagccgacctggtgctggacctgcacaccgatgacgaagcgctgccgtacctctacatccaccgcagcttctggcccgaccagggcctggcgttggcggcggccttgcgcgtggacctggtgatcgtctgggacgagggcggcgatggttcctttgaagagaccatcatcaaccatgcatcgccgcaactggccgcgaccattgagctgcgcggccaggcggacgtcagcgatgcgctggcgcaacaggatgccgacggcctgtgggcgtggttgtgcatcaacggcgtgatcgacgaggtggccgccatcgccgagtggccaggggacgtggtcgacatgggctgcatggaaaccatcctcgcgccttgcgccggggtgctggtgttcgagaaagccctgggggattacgtggaggaaggccagcgtttcgcacgcatcatcggccgccccggtgacccgtgttccgaagtgatcctgcacgccgcccaggccggccgtatggtcacaggccaccgcgaacgcctggtggcccagggttcggtggtcgccaagttcaccgggacgcgcttatccgacagctacagcggtggcgtgctggacccgtagcggtgtctgtgtgggagggggcttgcccccgattgcggtggatcagctgtagatgagttgactggcctggtgctatcgggggcaagccccctcccacttttttaacgcagtgtgccattggtcgaagtgtgagcccaaccgcttcaaccgccgcatcgcactgtccagatgcgggctggcacagaaatgcaccacccaccggggcttgatcgagtgcctgcgtgcggaaatctcacggactctctaaacgctccagcaacaggcgctccagggtgtccaccggcagcggccggctgaacaggtagccttggatctgatcacagccggcctccttcaagaacgccagttgcgcctgggtttccacgccttcggccaccacccgcaggctgaggctgtgggccagttcgatgatggtacgggtgatcgccgcgtcctgcgggttgctggtgacttcgcggataaacgcgatgtcgatcttcagcgtgtcgatgggaaaccgccgcaggtacgccaggctcgaatagccggtgccgaagtcatcgatggagatcttcacccccatggcgtgcaggcgctgcaggctggcgatggtgtgctgggtgttttccatcagcgagccctcggtcagttccacctccagccaatgcggctcgaccccggtgcgggcaagggtgcgcgcaatatcggcgatcaggtcgccttcgatcaattgatggccggagacgttcaccgacacctccaccgcgcctatcgcgccgcgttgccactcggcgatctgttggcagacctgctcgatcacccaacgccccacgggcacgatcaagccgaggctttccaggatcggtatgaacactgctggcgataccgcgccgtattccggccgttcccagcgcagcagcgcttctagggcacagatgcgaccgctcagcacctcgaccttgggttggtaatgcaccgtgaagtcatggcgtgccaccgcttggcgcaagtcgttttccagggcctggtgggccaggtcatgcacgttcatgccgatctgtcgttgcgccaactcacgggagtggctgaccaggtcgccgcgttccttgagccgcagcaggttacgcacgcgcaaccatagctcgacacgttccaccggcttgctgatgaattcttcggcaccggcctgcaacccgctgacacgggcgctcggttcgctgagggccgacagcatgatgatcggaatacccgccgtggtttcatcgtttttcaactggctggcaacctcgtagccgtccatgcccggcatcatgatgtccagcaggatcaggtccggcggttgccgggccaccaactgcaaggcttcctcgccgctgctcgcgctcagggtctggtagccctcatgttgcagcagggtttccaggagtttgcgcacctggggttcatcatcaacgatcaacaacgttgcgggttggctggccatggagaggactcatgtgagagggcgggtgtgctgttgcaacaaggtatcgatcacctggtacagctctttgtagcgcagtggcttgatgatgtaggcgtcgcaaccggcgagccgggtcttttcgcgatcttctttcatcgccattgcagtcagggcgatcaccgggatgtgggccgtgagcgggtcgcgcttgagcagcgcggtggcagccaggccgtccatgccgggcaactggatgtccatcaggatcagcgccggttgctgttcgcgggccagggtcaggccggtctccgcatccgcggcccacagcacgtcgtggccagcattgaccagtaacaggcgcgccaggcgcatattggcttcattgtcttcaacgatcaggatgtgggccatgtggcctccggggcgcggtgcagcggcagccaggcaacgaaccgcgccccgcagccttcacggctggccacggcgacactgccaccatgcaggtcggtcagccgcttgaccatcgccaggcccaggccggtgccttcgaatttgcgtgccaggctgctgtcgatctggctgaacgccttgaacagcttgtccatgtccgcctcggcgatcccgatgccggtgtcgctgacgctgagttcgaggaacggttgatcagcgccgtcgggcagggcaaagcggtacaccggccagtcgccgggaatctggccgacctgtgcgcgaggcacctggcgcacggtcaacgtcactgagctgccgtgggcgctgaactttacggcgttggccagcaggttgtagacgatctgtttggtcttgcgcaggtccagctgtagaaggccgagatcgtcgggacactccagcttcaattggatgcgttgcaacgcggccttttcccgcacgatcagcaggctgttggccaacagccccgccagttctgcgttttccagttccagttccatcatgccggcctcgaccttggacaggtcgagaatgtcgttgatcaacgacagcaagtgctggccgctggtgaaaatgtcgccgatgtattcgcgctgggtctcgctcatgtcgccgaccaggccatccttgagcgcttcggaaaagccgatcaccgcgttcaacggcgtgcgcaattcatgggacatggtggcgaggaattcggacttcatatggctggcgtgctccagctccaggttcttttcttccagtgcccgctcgaaacctttgcgctcggcttcttcctgcttgcgcgcggtgttgtcggtgccgatcagcaggtagccgatgatggtgtcataccgattgcgcagggccgtcaccgaaaccatggccgacaggcgactgccgtccttgcggatgtaggtcagctcgtagatgtcttcgatacccctcgaggccttgaacaccagcgcttcgaagcccggcgtgatcggcgtatccagttccaggctgagggcggcggcgcgggtgatcagttcgacggggtcggagatatcggcgggggtgatgcggttgaccacatcggcggcggcatagccgagcatgcgttcggcgccgacattgaagatctggatcacgcctttctcgtcggtggcgatgctggagaagtacgcgctgttgaagattgcgtcttgcagggcgccggtcttgagcagggttttctgccgcttgaactcgacgatcttttcagcccgcgattgcggttgttcgggtaacggtgtgtccatcgctttggcgttccgtgacgttcaggcccgccatcatcgaacgacgatggcgcagagcatgctcacagaagatcgcttgagggcgacgaggaggagatgaggtacttggacaatagcagagattatggctttttgatggcgggccaacggctatcccacttcaaatgaatatcttcgggtcaaattggctgcttttcggattaacggctgatgaaacgtttcatctgtcgacaaatgagcaacgcaagcgcttgcgtaaggaaatgtttctacattagagtcgacccactgacgacaaaaataataaaaccaggagctcattcatgagccttgaacccttgcttgaaatgcagggcatcagcaaaaccttcaacggtttgcgcgtgctcaagaatgtcggcctgaaggtctaccccggcgaaatccacgccttgatgggggagaacggcgccggcaaatcgacgctgatgaagatcctctcaggcgcctaccaggccgaccccggcggtgaaatccgcatcgccggccagcccgtccccacattcgaccccgccaccgcaaaaaccctcggcatcgccgtgatctaccaggaactgagcctgtgccccaacctgagcgtggccgagaacatctacctgggccgtgaactgcggcgtggctggaccatcgaccgcaagggcatgcaggcggggtgcagcgaagtgctgcaacgcctgggcgccgagttcaccccggccacgcgggtcagcagcctgtcgattgccgagcgccaattggtggaaatcgcccgcgccttgcacgcccacgccaagatcctggtgatggacgaaccgaccacgccgctgtcctcccgtgagaccgaccgcttgtttgcgttgatcaaacaattgcgcagccaaggcctggcgatcatctatatcagccaccgcatggccgagatctacgagctgtcggaccgcgtctcggtgctgcgcgacggccagtacatcggcgaactgacccgcgaggcgctatcggccgaagtgctggtgaagatgatggtgggtcgcgacctgtcagggttctacaaaaaggagcacgccgcctataaccccggcaacgtggtgatgcgcgtgcgcgacatggccgatggcaagcgcgtgcgcccgtgcagtttcgacctgcatgccggtgaagtgctgggcatcgccggcctggtcggggcagggcgcaccgaactggcgcgcctgatcttcggcgccgacccacgcacctcgggcaccctggaagtggtcggcaagacagtcacccaactgcgtaccccggcggatgcgatccgcgccggcgtcgtctacctcaccgaagaccgcaaggcccagggcctgttcctggacatgagcgtggcggacaacatcaatgtctgcgcctgcgtgccggatgcccatgccggcggggtactcgatcgcgcccatgccgcgcagcgcgccacgcaggcgatcaagtcgctgtcgattcgcgtggcctcgggcaaggtcaatgtcggtgcgttgtccggtggcaaccaacagaaggtgctgctggcgcgcctgctggaggtcaagccgcacgtgctgatcctcgatgaacccacccgtggcgtcgacatcggctccaagtccgagatctaccgcatcatcaaccaattggcccaggccggcgtcggcatcgtggtgatctccagcgagctgccggaaatcatcggcacctgcgaccgcgtgctgatcatgcgtgaaggccagttggtcgcagaagtcggcggcgcctccggcgacgcaatttcccaggaacgtattattgacctcgccaccggtggcgatcaggtggtggcccatggctgaattgaatatcgcaacaaccggtaaggcagagcgcgcccgcgagctgatgcgcacggtcggcatgttgccggtgctgatcctgctgctggtgggctttgccctggccagcgagaacttcctgacggtacagaacctgtcgatcatcacccagcaggcgtcggtgaacgtggtgctggcggcgggcatgacctttgtgatcctcacggcgggcattgacctgtcggtgggtgcgatcctcgcggcgtcggcggtggtggcgttgcaggcgtcgatgtcgccgcagttcggcatgttcgggattgccgccggtatcggctttggcctgttgctgggcctggtcaacggcgggctgatcgcctttatgcgcctgccgccgtttattgtcaccctcggtgcgctgacggccatgcgcggtctggcgcgcctgttggcggacgacaagaccgtgttcaacccggacctgccgtttgcctttatcggcaacgactcgatcctcggtgtgccctggctggtggtgatcgccgtggcagtggtggcgttgtcgtggttcatcctgcgccgcaccgtgatgggcgtgcagatctactcggtgggcggcaacccggaagctgcgcggctgtcggggatcaaggtgtggaaggtgctgctgttcgtctacgccatgtccggcgcgttggccgggctgggcgcggtgatgagcgcgtcgcgcctgttcgccgccaatggcctgcaactggggcaatcctacgagctggatgcgattgccgcggtgatcctcggcggcaccagttttaccggtggtgtcggcaccatcggcggcacgctgatcggcgcgctgatcattgcggtactcaccaacggcctggtgctgctgggtgtctcggacatctggcagtacatcatcaagggcatcgtgatcatcggcgcggtggcgctggatcgttatcgtcagtccggtgcacggacctgagttcactccaacaacaatcacaagagagacccgcatgaacctcaaacgtatctttccggtcattgccttggctgccctgatgtcccaagccgtcgaagcccgtgagttgaaggccctcggtatcagcatgggctcgctgggcaacccgtatttcgtgaccctggccgatggcgcaaccgcccgcgccaaggagctgaaccccaacgtcaaggtcacctcggtgtcggccgactatgacctgagcaagcaattctcgcagatcgataacttcatctcgtccaaggtcgacctgatcctgatcaacgccgtcgacccgtccgccatggcctcggcgatcaagaaagcccgggatgccggcatcgtcgtggtggccgtggatgtggacgccaagggcgtcaacgccacggtgcagaccgacaacgtcgaagccggcaagctggcgtgccagttcctggtggacaagctctccggcaagggcaatgtgatcatccagaacggcccgcaggtcaccgccgtgaccgaccgggtcaaaggctgcaaggcggcactggccggcgcaccggagatcaaggtgctgtctgatgaccaggacggcaaaggctcccgcgaaggtggcctgaacgtgatgcagggttacctcacacgcttcccgaaaatcgacggcctgttcgcgatcaacgacccgcaagccatcggcagcgacctggcggccaagcagctcaagcgcagcggcatcctcatcacctcggtggacggtgcgccggatatcgagaacgcgctgaagaccgacacgcagatccaggcgtcggccagccaggacccttgggccatggcgcagaccgccgtcaacgtgggcaacgatattctcaatgacaaagccccggccgaagcggttaccctgctcacgccaaaattgatcacccgtgacaacatcgcaacgtacagcggttggtcgagccaacattgattcattgagaggaacagcgccgtggtcaccatggatgacgtggcaagcagggcgggggtgtcgacgtcgacggtgtcccatgtgttgaacggcacccgcaaggtcagcccggcaacggtgcacgcggtgcagcaagcgatccaggcgttgggctacatccccaacaccctggcgcgttcgctggcacggtcaagcaccagcacgattggtgtggcgatttcggcgctgtccaaccattacttcagcgaaaccgtgcacgccattgaaaacgagtgcgccaagcacggctacatgatgctgtttgtcgacacccatgacgacccggagcaggagctacgggtggtcacggcgctgcatcatcgacgggtcgacggcatagtgctggcgccctccaacggttccaaggccctgcagtacctacgggacaaccagatcccggcggtgttggtggaccgcatgatgagcgagcaattcgaccaggtcggggtggagaacacgcagtccacccaagccttggttacccacttgattgaacacggccaccggcgcatcggctttatcgccgggcgtgaggggttcagcaccaccgatgagcgggttgccggataccgcgcggcgctgcacggcgcggggttggcgtttgatccgcagttgctggtcaacggcggctccaatactgcgccggcgcgccaggcgacggtgcagttgctgggcctggcggcgccacccacggcgatcatggccggcaataacctgatgaccctcggcgcgatgcaggccctgcgtgaggcgcagatcgacgtaccggcgcaaatggccctggtgggttttgatgattttgactgggcggattttttcgtgccgcgcctgaccctgatcgcgcagccggtccaggcactgggcacgcaggcagtgaacctgttgttgcagcgcatggcgtcgcccgacgcacccgcccacagtgtgcgcctggcgccgactctgcaatggcgtaattcatgtggctgtaatggattggaatgacccccttatgagcagtcccgtttccctcggcatcgacctcggcacctcggaactcaaggccatcctcatggatcttgacggtacggtgctggcccatgccggcgtgcgcttgagtgtgtcgcggcgtcacagcggctggtccgagcaggcgcctgaagattggtggcaagcgtgcctgcaggcgctggccgaattgcgcgggcatcctggatttgcccgcgtggcctgtatcggcctgtccgggcagatgcacggcgcggtgttgctgggcacggacaaccgcgtgttgtacccggcgatcctgtgggacgactcccgtgccatcgccgaggccgaagagttgggtcctgcgtttgccgacatcaccggcagcctgcccatggccgggctgacggcgccgaaactgctgtggctgcaacgccatgagcccgaggtgttcaaggccattgattgcgtactgtcgcccaaggattacctgcgtttgcgcttgagtggcgagcgcatcagcgagatgtccgatgcagcggggacgttgtggctggatgtggcgcaacgtgagtggttcgcgccgatgctgcgggccacgggcctctcgctggagcagatgcctcggctggtggaaggcggcgctgcgagtgccgtgctgacggcgcaaggccttggcttggcgccctcggtggtgattgccggcggcggtggtgacaacccggtggcggccgtggggatcggggcgatcaatgccggtgatggcttcatcaccctcggcaccagtgctgccattgtcgcgattaccgatcacgccgccggtaatcccgcgagtgccgtgcacagcttctgccatgcgctgcctgatcgctggtacaccatgggcgccatgctcgccggtgccagttgcctgcgttgggtcacgcggcttacgggaacggcggatgagcaaaccttgctggaccaggtgcaggcgcagttgccgatcgaacagccagtgtcacttagtacgccgttgttcctaccgtacttggccggtgaacgcaccccgcataacgacccgctgctgcgcggtggtttcatgggcctgggccatgactgtacaccggcgatgctcggttatgcggtgatggaaggcgtggggttcgggctgttggatgcgttgcgtgccgtgcaatcaaccggtgccgacgtgggcgcctgcgcgttggtgggcggaggggcgcgcagtgaatactgggcgcagttgctggctaatatcctgcagcgggacatcttcaccctgcatggcagcgaattgagcgcgtgtatcggtgcggcgaagctggggtttgtggcgatagagcagggtgcacaattgctggcggcggggatgccggtcaaggtccggtatagaccagatctgatgcagcagccggtgttggaggcgcgttatcgcaagtttcaaggtttactgagcgcggccaaggcccttcacgagtagccttttgtagtgagcgggcttgtctgggtggcctgttttggtgaactggcctgttgtggcgagcgggcttgccccgcgttggggcgcgaagcggcccctttcagcatcaccgcgcttctccagaatttggggccgcttcgcagcccaacgcggggcaagcccggttcgctccccacatcaggacccacaacaagctgctgccgctagtcgcccaagggcggcagacgccgtttcaccggagttttcttgacaatggccgtgttggtttcagcgtaggcgttgagccggtcaagcaggctgtccaggtgatccatggtgcgcacatgcaggcgtgcgatgaagcaatcctccccagtcaccttgtcacactcggtgaactccggaatcgcctggatctgccgctccacctcatgcaatttgcccggcaacgggcggatgcgcacgatggcttggagcagataaccgaaatgcctggggtcgatgtcgacggtgtagtgggtcagcacgccgcgctcttcgagacgccggaggcgttcaccgacgctcggcgaagacagcccggtaatcccggccagggccttgagcgacaagcgcgagtcgtccattaaagcagcgatcagttgctggtcgatggtgtcaatcatggtgtccgcctaattaataaaggcaatccaggtgtctagccttttttaggcgctggagccagtctcaaccagattgccataattgagcctcacttgaggagcctcaatcatggatacatccatccgtcgcgggtcgtgggaaatggtcgccgccatgctgatctcgggcaccattggctggtttgtcctggtctccggcgtgtcggtgatcgaagtggtgttctggcgctgtgtgatcggcgggctgacgttgctgttggtgtgcgcgttgctcggttatctgcgtctggacctgatcagctgggccaagctcagcctggcgatgctcagtggcgtggcgattgtcggcaactggttgctgctgttcgaatcctattcccgcgcgtcgattgccatcagtacggcggtgtacaacgtgcagccgttcatgctggtcgtgctcgccgccgtgtttttaggggaaaagatcaccgtgcagaaactcgcgtggctgagtgtggcgttcctgggcatgttggcgattgttaccgcccatggtgatcaaacaaccggcgacgattacctgaccggcatcgcattggcactgggcgcagcgttgctgtacgcgattgccgcgctgatcatcaaacgcttgaaagcagtgccgccacatttgatggcgttgatccaggtaaccaccggcgcgttgttactggcgccgctggtgccttggaacagcttgccggctacgaccagcgcctggggcgcactggtgacactcggcgtggtgcacaccggcgtgatgtatgtgttgttgtacggcgcgatccagaaactgccgacagccctgaccggtgcactgtcgtttatctacccgattgcggcgatcttcgtcgattggatcgccttcgggcatcgcctgggctggctgcaatggttgggggtgctggcgattctattggcggcggctggattgcaacgcggttggtggtggcgattaaaaccgaatgggtggactgaggacgcttgaaccgcgtttattcactcaagtcgagggaacgagttcctacgcctgcgccacacatggagacaactttaagacgaagcgtactgcccgttttagcgaaaactctctcccgtgatgatgaaagatgaaatccaacttactcagctctccgacgcataaatctctggcaacgcagattcaacaggagtcgcaacccacgaataaccgtcatcgacgcgaggtggaatcccctgccgttcgaaccgaaccaggaccaccggaagtagcgcagcctaaatccggaggtatttccaagcccaacgttacatcaagggagtcctcatcagagctccccaaaagctcaatgcgttgggtgagttatcaacacggtgtcaatcttgccgacgcgctggaacctggttcttcgaagcgaatgactcaggaagaactgatcgccctaccggaaaaaatgagcgcagcggccgttacacctgagcaagaagagttgattgctgcgacacgcgttggtcctgcgctggagtgggctgtagctaacggagtccttgaagaaaaaaccgattactcacaagcggaaattcacgaggctattacggcgctgaatctccatttcgaaaaaatggcgaatgcagtcagcacgctgaccacgcctatgccgatgagaaaaaattacttcatcggtacacaactcgtatcgcccatcaagggccatgccgatccggataatccaaaatacccggtggcgctctatgatgacaaaaagtttgcggaagactttaaagttgatctagcgtccaaaaaagccgcttatggcacgatcatccaacagttggtcgctacgcttccattgccggatcggatagccatcgggcagggtgaagtcgaagtgtacgcaatgaaggcgccgggagagggcggtgagcttgaacgcaccgaattcttgattaaaacggttcacaagggaaagacaacggtttatcaaattgcccctgaacggggaactgccaccaagcgtgatgacttcatcaaactcttcaacggcaacgacgttatcgggaagcaaaaattatccgatggcagttattccagtgtgttcactgcttgggaaaggccgaatattcaagacggccggtatcagccaagggtggatcaccgacctggcgcggcattggacaatacgcctttttcagcacagcttcatacgttggagccgctggcgaaatggcctgcggcaccggaagacgcagagggaagcgccagcccgcaggcatccttcttagagcgaagcaatcagatcgggaccgccgtatcccaaaaactgttttatgcgaaggacctggatttgctgctgatggcggaagaagacccggagcgggtcaccgaatccgaaaaaaaggacagggagaactatcagactttcaaagaggacagggagaaacgtcgccaattgctcaaaggttttgtgcctttctggcgcggaatcgaggcaattattgacggtcgcccaatcgaagggatcgcacaaatatggatagatatcctgacattcatgatgcccgttgaaaaagccgccgcaggtgtagtgagggccggtttccagatgattaaacgcgtgattccaaagtttttgaaactgtcgacaaacttcgccagctacaccttcaaaccgggtgttgcaggaattaaatgggaaggtggcgtgcaggggctgaaatggacatcgagcgcttccaagggggcagccaagggggcagaacaattcaggggcgctatggctaccatacctctgacccagccgggcgttagagaaattgagttgggaggtatcaagtattttgttgccgcaaagcctgacgcaggggatggcgtccactacagtctgcgagtggtgagcccggatgactcgacgaagctaatcaatagcgggaaagttgccaagcctgatgaggcaggtgtttggaaaatgcccgaaagggcgggtcgagatgtaagcggcgcgcccatgacgcagatgaaggggacaatgcaagagctcggtgtcctaggcggtgaaatacatacgtttacggatatctataagggcgagacacggctgaatgttgtcgcgcatggcatagaacggagccctgcggaagtagcggcgggcgttccttctaaagtgatggttgatggcaaagcttacagcgcaaaagagttggttgcgtatttgaagacacagggtattgatcccgcaaatccgcgctataaaaatgtccggctgttgatatgttatgcggcagacggcggaaagcattcgtttgccagcgattttcaaaagattgtgggtaaacctgttaaggcctttgaaggaaccgtcaccacgtcgcatggcgcgacggccatggaatatgttcgcaaagagttaataaaagacatgcgcgccttacatccagacttggatgacaacggtatcgaacttttggtccaagccgagatagaaaaactctttagtcaaaagtccatcttcgtcaacaaagccgacggcaccctcgtgcaaatacaaacggcgcctcagggcgccaacatcggtgagcatatacttaggattgaatataaaccggtacatttcacccggtgacgctcttctctcactgacgggccgctttagaacaaggcggcgtatcattaaaaactgccgtttgtaaaagcgaacgtgctcaccgactttttgtgagcacgctctcctatacgttggggatcagtgcgtgccctggaaaataatgttttccgggttgaagtgctccaccgcgctgcccggctgcggcaagccgaggatgtggcccttgatcttgcccaccacgtgcatctcgcagggtttgcagtcgaacttcagggtcaacacttcatcgccatggatcaactgcatcggcgccaccttggtcttcacgcccgtgacgcccttggcctgtttagggcacaggttgaacgagaaacgcaggcagtgcttggtgatcatcaccggcacttcgccggtttcttcgtgggcttcgaaggcggcgtcgatcagcttcaccccgtggcggtggtagaagtcgcgggctttctggttgtagacgttggcgaggaacgacaggtgcgcgtccgggtacaccggcggtggcgttgtttccgccttgcggccaccccttgggtgcgcagccacgcgcgcggcggtcagcgcttcgatcacttcacggcgcagggccttgagctgtgagttggggatgaagaacgcctgcggcgcatccagttggatgtcggtcgcgtggtattcggtggtgcccagttggccgagcaggtcgcgcagggtgtccagcgcctgttccggtttgttggccacgccgaacgggccgggcagggtgacgctggcgctgataccttcttcgctggtggcggtgacttccagctgtgcttcgcgcagacgtgcggcccaggtcaggccgatacggcgctcggatgaggtcttgagcagcgcctgttgccagttgtggtcgaggttgcggttcaacgggtgattcgggcgcagctgatgcaggccggccggcatttcattcggctcgacgcggtagcggtagcgcttctcaccgtcttcctcgaactcgcctttaggctcggcgatgttggcgcggaaacccaccacttcgcgcttgaccagcacattcaggccgtcgccattggacagcggctcatgggtgaccacttgcaggtcacgcttgccggctttttccaccacacccaccggcaggccggtgaaggtcggggtgtcgaaggcgccgatgtcgaccttgcggtcagtgacgaaatagtcggtgctgccccggtggaaggtcttttccgggtcgggcaggaagaaatgcgcggtacggccgctggacgcgcgcgccaggtccgggcggtcttcaagcacgtcatccaggcgctggcgataataggcagtgatgttcttcacataacccatgtccttgtagcggccttcgatcttgaacgaacgcacgccggcttcaaccagtgcgcggatgttggcgctctggttgttgtctttcatcgacagcaggtgcttttcaaaggccacgacgcggccctgatcgtctttgagcgtatacggcaggcgacaggcctgggagcagtcgccacggttggcgctgcggccgttctgcgcgtgggagatgttgcactgcccggagaacgccacgcacagggcgccgtggatgaagaactcgatggcggcatcggtttcgtcggcaatggcgcggatctcttgcaggttcagctcacgggccaataccaactgcgagaaaccggcctggtcgagaaacttggcacggcccagggtacggatatcggtctgggtgctggcatgcagctcgatgggcggaatatccagctccatcacgcccaggtcttgcacgatcaacgcatcgacgccggcgtcgtagagctgatggatcagcttgcgcgcaggttccagttcgttgtcatgcaggatggtgttgatcgtggtgaagacgcgggcgtggtaacggcgggcgaattccaccagctgcgcgatatcgctcacgtcgttacaggcgttatggcgcgcgccgaagctcgggccgccgatgtacacggcgtcggcgccatgcaggatcgcctcgcgcgcgatggcgacatcgcgggcagggctgagcaattcaaggtggtgcttgggcaaggacatagtttttttagtcaggcttgtcacggttgaggcgcgcattgtagctgtgaaatgcctgaccggcacccactcaggcctgagctgccatcgccgtgacttccacgcgcatgccgtcgaccgccaacgcagctacgccaaccgccgcgcgcacgggccagggcttggcgaagaagcgtttgtagacttcgttgaaagcggcgcgatcggccatgtccgtcagataaatggtcaggtgcatcacccggcccatggaactgccggccttctccagggcgactttcagggcttgcagggtgcattcgctttgcagggtgatatcgcccagttccaggctgccatcggcgcgggtcgggatctgggtggacaccaggatgccgttgaagccgatcacatccgaagaaatcgagtcggcatcggggtcaggggtgtagtgcaggtcgtggttggccatgggcgcctcgcgttggcaggttcagaaaggcgcccatggtccccgaaaatcaccgcaggggcaaactacgcccagcggcggaacagcacgctggcatttacgccgccaaagccgaaaccgttggacagtgcatagtcaatcggcatcggccgggcagcaccgcgcagcatgtcgaggccgtcggcgagggcgtcggggttttgcaggttgagggtgaccggggcgatctggtcgcgcagggcaagcacggtgaagatggcctcgataccgcccgccgcccccagcagatggccggtggcggatttggtcgaactgatcgccgggctgccgtttgcaccgaataccgtcctgatcgcggccaattcgcctttatcacccaccggcgtcgaggtggcgtgggcattcaagtactgcacctggtcagcgtcgatcccggcctgacgcaaggcctgctgcatcgctcggcgtgcgccgtcgccgtcttccgggccggcggtcatgtgataggcatcggcactggtgccgtagccgaccaattcggcaatcggctgcgcacctcgggccagggcgtgctccagctcctcgatgaccaggatgccggcgccttcgcccatgacgaagccgtcccgcgcctggtcgaaagggcgcgaagcctgctccgggctatcgttaaagtcactggacaacgcccgcgccgccgcaaacccggcaaggctgacgcgatggatcgctgcttcggcaccgccgcacacagccacatccacttcaccggcgcggatcatgcgcgccgcatcaccgatggcttgcacacccgctgcgcaggccgtcaccggcgcacccagcgggcctttcaagccgtagttgatcgacacatgcccggcggccatgttgctcaggaacgacgggatggtgaacggcgacaaccgccgtgggcctttgctgtcggtggtgcgtaccgcgtcggcaatcgccgggaagccgccgacacccgaggcgatgatggtcgcggtgcgttcctgcgcttcgggcgtgctcggcgcccagccggcctgcttcaaggcttcatccgccgccgccagtgcgaacaggatgaagcggtccatcttgcgctgttccttggctgccagcagtcgatcagggtcgaacccggcgtctggatcctgctgcacgctctgcacctggccaccgatgctcacggccaggtctccgatcaggtcttccggtaagcgacgaatacccgactgcccggccagcaggcgttgccaggtggattccacgtcagcgcccaatggcgtcagtgcgcccatacctgttacaacgatgcgtttactcatgatcaatcgactccagttgcggtgaaggaacagaccttatggacgtcactatcatcatgaaagtaacatggcgtcacgcacattggcactgacccacaggaatccccatgcaacgcaagtccctcaccagcgacgaatgccccattgcccgcagccttgagcgggtaggggagtggtggagcatcctgatcatgcgcgacgcgttgcagggcttgcgtcggttcgatgagttctcgcgcagcctgggcatcgcaccgaatatgctcacgcgtcgcctgagtgccttggtggaggcggggatgctggagcgccgcgcctacagcgaacgaccgccgcgctacgaatatgtgccgacggccaaaggcgaggatttccgtatggtgttgatgtcactggtggcctggggcaatcggcattacgccgaggagggcaccagtgtcgagttggtggagcgtgaaacgggcaggccggtgcagcccatgttggccagcgcggatgggcaagtggtggggtttgaccagtgcaccttgcagcccggtccggcggccagtacgggcatgcgcgaacgtcttgcgtggctcgatgcaaaaccttgatcgcacgagtatttgacgccagaaaataatcccctcaaggcccgtaaagtcacgtattccgcagccgatagctcatcaagacacagggtttttccgcacggctgagggcacgtcatgttcaataaatcactcaaaacagaactggcggccaggacggccgaagtcaccgagtacaaaggactgatcagtgcactggagcgctccatggccgtggtcgaattcgacctgaacggcaaagtgctgcgggccaacgacaacttcctcaagatcctgggctacagcgccagtcaactggccggcaagtcccatcgcgacttttgcctgccggcgctgaccagcagcccggcctacagccagttctggagtgatttgaaagccggcaagtttgtctccggcacgttcaagcgcgtggatgccaacggccggaccctttggttggaagccagctacaacccagtgctggacgagcgcggccaggtgctcaaagtggtcaagtacgcgctggacgtcaccgcccaggtggagcaggacgcggccacccgcagcaagttgacggccgtggaccgtgcgatggccgttatcgaattcgatctgagtggccaggtgctggacgccaacgcgaacttcctcaacgtgatgggctacaccctcgcggaaatcaaaggcaagcaccaccggttgttttgcgagcctgcgctggtcagcagccatgagtacgccgatttctggcgtcgcttgaacaacggtgagttctttaccgggcaattcaagcgcctgggcaagcacgggcatgtggtgtggctggaggccagttacaacccggtgtatgacggcgacggcaaactgatcaagatcgccaagttcgccagcgacatcaccgagcgcgtggagaaattcgaggaagactcccgtggcgcctcacgggcgtaccatatttcttccgagaccgagcgttttgccgagcatggcacccaggtgatccaagagaccgccacggaaatgcgccgcatcgccgagaatatcggcgcctctgcgcggctggtggggcaactgggcgaccgttccgaacagatcaccgccatcgtcaacaccattcgcggtattgccgaccagaccaacctgttggcgctcaacgcagccatcgaggcggcgcgcgccggggaccaggggcgtggcttcgcggtggtggccgatgaggtgcggcaactggccggacgcaccagccgctccacggcggaaatcgccgagatgatcggcatgatcctctcggaaacccgcgacgcggtgaccagcatgaacgcgacccaggaaggcgcgcaacgcggcgtcagcctggccgatcaggcgggttcggtgatcctgcagattcgcaccagcaccagcgatgcggtgcaggcggtgagcatgttcgcgtcgaaactggatgagtcggaagtcatacccaagactgcggtcggctgggtaggctgacgctctccatttggaggagcgagcaagctcgctcctccagtgggccttgtttagagcagggtaaacggatagtcgacgatcaaccgcagctcgttcaggtcaccatcgcgctggtcggcattcgatgccacgatcgcatcacgcacacgcaacgacagattcttcgccgggccactctggattacgtacttggcttccaggtcggtctcgtggtgtgcgccatccgcaccgtaattaccgacataggcgctatgggccggcgtgtgggtgccatcgatatccgagccgttgatatagcggcccatgaaactcaaccccggcacgccataactggccatgttcaggtcatagcggataccccaggactgctcgcccgggccgttgaagtcgttccattgcaccgagttggccaggtacaccgaatcgccgccttcgccggcgccgttgttgccggtgccgatgtagtcgaacggcgtgtcgccatgcaccttctggaacgacagcgtcagggtgtgcgcctgcaggaacgagtaagccgccgccaccgaataggtggtgttgttgatcgccccggccttggcgctgccggtgtcgagggtgcggtacaggttgccgtccagcgccagggactggtcatgccccaacgggattacgtagttgaggttggtgtagtactggcgccagatatcttccagctcaccggcatacagcgtggcgctcagggacgggctgaagctgtacttgccgccgacgaagctggcgctgttggcggcgatgttggcgtaggtggcgtagatatcgtggtcatggttgctggtcatgccactgttggtgctggtgaaatgcccggcttccaggtccaggccggcgatttcgctgctggtcaggtcaaacccggtggcggtctgtggcaacaggcgcgtgccgccggtggcgaagaccggggcggtgggctgcatgtcgccgaatttgagttgggtcttggagactttgatcttcactgcggcgccgactgagccgtaggcgtcttcgggatcgccatggcggtcggtcggcaggttgccggtgccggcgtccgcatgggtggcatcgagtttcagcccgccgtaggcataggcgtccacgccgaagccgagggtgccctgggtgaaacccgaggcgtagttgagcattgcgccctgggtccagtcgatattatcggcccggccgccttcacggttgcggttcatgtagtagttgcgcaacaacccagtgacgctgctgccctcgacaaatcccttggcatccgcctggtcgctgaccgactcggcaaaggccatctggctgataccggcacacaccgccagtgccaataggctcgactgtttaatcatgttgtgacttccccggaataatgaacgcgcgcacagaaacaccgcacttatcgaatggcgcataacgttgtttgggcagatgtttgcaggtgagctgttacggttttttattgtgttcggcgtggttgccgaggtggattccaggcacagtctgcgcggccgccagcgggccaagggatgaaactcaattaattaaacttcacgctgtttaatttctttcgggtgtacgttgaacctgtcttagccgctctgcttcgacaacatcctttggttgccgccgcaggctctgcggcggattttttcacaacatttcacaagccgggtttcatcccttcggcatcggtgcatcagtggcttgcaaggcgcgcgacgtcgacccgataggtcggcctgtcatctttcagtaaccctcaaggtctttgctctcctgaccggcccgacatgatcgcccatgacgatcatgcactggcccccgtcatcaaggagcacgcgcatgtcagcaccggtcagcaatgcacccgcgatcaagactgtcacgaataacgattccagcgccgaatggggtaacgcggtcgatcgggccaaggccaaggacgccggtatcgaatggcagcgccccaaggatgaccaccgctcggcccaagacatcatcgacgatagcccgctgctgaagaacctcggcaaccagagcggagtgaaggacaagttgcgcgaacgtgtcggtgattttgagcacgatgcggacgcggcttatcgcgccaaccaggtgctgggccacgtcgagcgcttcgatgaaaacggttcgcgcctggctggcaacacgatcgacaatggtcgcgtggacggtttcaccaagggcggcgatgccaagcacggcaccgaggccgggcgccttcaagacttcggcaagtatggctgggagaacctcaagggcgagctgccgcacgcggacacggtgggccaggacgataagcgccgtgaggcggcggacaaggctggcatcgtctgggtgctgccggagggcgacaagcgttcggcgcaggacatcatcaatgacaacccgttgctgaagaaccttggcaaccagagtggggtgaaggatgcgttgaaagagcaggtcggggacttcgacaaggacccgaacgcggccttccgtgccagccaggtgctcgaccgggtggtgggttatgacgagaaaggcaacgcgttgacaggcaaggatgtggccaacagcagtgtcgacggctttaccaagagcggtgaagcgcgccatggcaccgaagcggggcgcttgcaggatttcggcaagtacggttacgaagcgctgggcaagcccccgtccaacgaccagatcggtagctacaaagactttctcaagacccatccggaggccgacgcaggctccaggcagatcgctcagtacggcgcgatcctggatgccaagttcgattcgatccgcggcaagaccggcggcgatggcgctgtcaccgaacagaatatcaaggactacctcaagcaaaacccgcaactgagcaaggacgagaaagaggcgctcaacttcttcgcccagcctggcgccttccgcaagctcgacaccgccggcaacagtatcggtgataagcccgacggcaaggtcagccgcgacgacgtgcaggcctggctgaagacatccgcacccaccgatgcccggagtctggccagcctgatcaccgacgtggccaccggtaacctcacgggcaaggtcgccaccagcaagctggacaaggacatcttcgagcatccggaaaagtactcggccgagcagaaggccgcagtgctgctggaactgcaggagacgcagaaacttgtggtcgacggcgccaacgccggggtctggaacagcgactatggcaaggtttccatcgccaaccgctcgggcgcgatctgggagccgcaaaagctgctgcaagacatcaacgaccacatggccatcttgcagggcgacaagccaactgccgagtacatcaagaacgccggcgaccaggcggtgaagaccctgtttgaagagaatcccggcctgaaggacgccgttaccaagacctatgaggaccaggtcaagtccggcaaggccctggacgccgcgtgggacgccaacaccaaggacggcaagaccgaccagcacacagcgctagccggtttctacgccaccgccaccagcctgcagtcgattctgggtatcgacgatgccaaggcgatccagggcgcggtcgccaaatccacgcataacgaagacttcaagaccttctacaaggatcagttggccagtggcgaccgcctgcgtgagttgctcaagcacaacacgcccgagcaggccgcctcggagttcagcctggaagtagcgctttataacgccgcgctcgatccggccttcacggcccagcacgaccaacagctcaacgagaatttctccagcatcgcccaggataacctgttcaagggggctggcttcgacgacatcaagaccgctttcggcaaggacggcggcgcggagttggacgaagacaaggtccgcacgttgatcgaccaaatgcgcaaggaaagtcccgagctgctgctgaaccaggacggcaccgtggccaccaccgaccaggtcctggcgggtttccgtggcaactgggacctgctccgccagggcaccaaggccctggacaagatgggcaagttgtcggacttcgaccccaatggcggcgccaaaggcgcctacggcagcggtgtactgcatggtgtaagcggcctgttcctggcgggtgtcaccattgcacgcggggcgcagagcggtggaaagctgaccacgcgcaacatcgtcgacatcaccaccggctccgtgcagaccaccaccgtgctgatcgagggcggcaccaagggctaccaggaacacctcgccaagtcgatcaagaacggtgagcagaccctcaaggatatgaaagacggcaaggtcatgctcgacctgctcgatgaggtcaaggacaacgtcaaggatggcaagcacgccaaggtcgtggcgaagaacttcgaggaagccgccaaaggtatcggcggcctggccggcatcgtcgtcggggcgtatggcatttttgatggcgtcaacgcgttgcgtcgtggcgacaagctgagcggtggcttcggcattaccgcaggctcgctgggtgtgctggccggcagcgcctcggccgcggagggcggcctgggtttactcggggcgaacctgccacggtttctcccgggcctggcggccacggcgggcgtgctgggcttcctggcggctggcgtggcggtactggcggccatcgtgcccggcctggtcaaggaaggacaggcacaggccaagtcggataagttcggcgaagtgctgggggattcaatccagcgttatggcatcgatggcgtcaaggatggaacgattgccgatattcctaccaaggattggccaggcggggagcaatggacttcgtgagataggctcgcccaccggtgccggtgacccgacatcggtgggcgttctgattctggagtcacttgaacgtcacccgccatagccgcgtggccaggtgatacgtcaccaccaggctgaaccggaaccaaacacccaccgccaccatcacccataacagaaaggggtacttgcgacgaaagaacttccgatagaagtgcaatatgcccctgtgcttatgccattcgacgaagtaaggccgatgttggctgcagccgcccaatgcgtgggttacccgggcgtccggcacaaacaggacgacccatccagcctggcgcaaacgcatacaccaatccaggtcttcgcaatgcaggaagtagcgttcgtcccataagccgatgtgctcgatggtttcccgcttgatcagcatacaggcgccggagatggcttccacggcaatgggcgtggagggcaatggctcctggtgcaataaaaaatcagagaacagcgacggcattacccgcgcaaggcgcgacaggccaaaggcccgcatgaatgcgcgccgtggggttgggaatacccgccgcccgcccggttgctcacggccgtccaggccgcacagtaacccaccgacggcgccgacgtgcggggtgctacgcagtacggcgagtaaacgggctatcgcatcggcggcgatcacggtgtcgggattgaggaagagcaggttcgccgccgtggaaaggcgcgcgccctggttgcaggccacggcgaaaccgaggttggcctcattgcgcatgatgtgcagtgaatcgctgaggagaggctcgccctccaacaggcccaggctatcatcgtgggaagcgttatcaatgacgatgatccgcgtcgcccccgcgttgaaaaccgatgtgacacaggccaacagcatctgccctgcgttgtagttgacgataatgacatcgcactcagcctgggcttgcgaggtgagcaacacgtgcttttgaggtgtttccagtacagccaacgtcgccactccctgtgtactcaaggtattgccgtagaaaaacgaaccgtccacgagttatcacgacgaaaactccgggtctgctcatctgatggattgaaacgcagggctttttccatcgccgcgccgaccccttcggggccgtccagcaaaaacgtgccagggcaagcgccccggtgcgccatctcgccaaacacggtgctgatcaccggcaggccgagtgcgcggtactcgtagtatttgatggggtcgacaaactgtgtcagcgcgtcgcatttgaaggggatcagcccgatatcgaagccagccatggcggccatggcatccgggtgcgagagctccccgatcaattggatattgctgggcagatccccaggcgggcgtgtgtgtattggcccgaccaagcgtatttgcgccaggggaaatgcctcggcaagcgccacgacgatttcccaggcgaaccacttcgcaatagtgccgacatagcccaccaccagcgggttggcgtttcctgcgtgcctggtgatgcggtaaggaagacgctctgtggcacaggcgttgccgagtaatgtcaccctgtcgcaatacgtcgacaattgcgcgtgcagcgcggaggaggatgtcagcacggtggagacggtttgcgctgttgtccgctggcgccgcgccatggcccgacgcgataagccggtataaaactcgcagaagttgtccatggcgtcgtagaaacttgcttcaaacaacggttctcgcagcagcattgacgctaggcaagagggttttccaatgcccagcaccgtgggctgcagtgccaattgccgcacgcgcgtaaacaggggttgccagagcagtcggttgacccaccctgaacccgcaataggctcgatgggtagggcgcgggcccggtacaccgtgagccagggggggacttcggtgtgcccgggtgctggctggggacgacgtagatcgctcagagcagggagacgcgtggggtaggggtctatccaaagcacgggttgttggtgtgtctcatggaaacatcgaaccagctcatggggacgctggctgaaactgtgccagggggttggggaaaggtagatcaggcgcatatgaaaaaatgctccaccagcacctggacgatgcgctctgcagccctgccatccccatagggggagtgatccttgatcatcgccgcgtaaaggctgtcgttgtcgaggagcgactgcaccgactcgacgatgtcatcggtgcgggtgccaaccagttggaccatgccatgtgccacggcctcctggcgttcggtttcattgcgcaataccagtacaggcactcccagagccggcgcctcctcttgaatgccgccggaatcactcacgaccaggtaggcgcttttcatcacgcggataaacctgtggtagcccatgggcgagcacaggtcgacgcgtgcatgccggcccaaggcagtctctatcggaactttcacattcggattcgggtggacgggaagtatcacccgaaggtcctcattacgctccaccagcgtatgaagcgccgtgcagatgtcacgcaagggggcgccaaaactctccctgcggtgcaaggtcaccagcaatacgcgctgtccatcagacggccgctcgcaggccacgtcgtcgcggctgaggctaaggtgcaaagcatcgatcaccgtgtttcccacgacatggatacggtgctcggcaatacgttcgccaagcaggttgctgcgtgctgcctgggtgggcgcgaagtgccatttcgcgattgtgctggccagggttcggttgagctcttccgggaacgggttgccaaggtcgcctgtgcgcagtcctgcttccacatggccaaagggtatttgcaggtaaaagcaggcgagtgcggttgcgaacaccgtcgtggtgtctccttgcgccagtacggcgtcggggcgccactcgatcagtaactgttcaagttgggtcagcaggcggctggtgagcgcgctcagcgattggtcggcgcgcatcaggtcaaggtccatatccggcacgaggccgaattcgtgcagcgcctggtccatcaattcacgatgctgagccgtcgctaccacacggcagtcgaacagcgtcgagcgcttgagcgcctggatgaccggcgccatcttgatgacttccgggcgcgtgcccaccacgaccatcactttgcatgtctgcatgacgtcatccatggcgatggggtatccaggttccccacttgctttcataaatcgctttgttgcgttcaaacagcgcttggcgtgcctgcgttcccatcagcttgaagctggcggacaagtgatggtgaatgaatacatcccgtgcgcaggcgttgaaatagcccgcttgttcgacccgccgacagtagtcgtcatcctcgaagaagccacagccaaacgcttcatccagcggccccacctgagcataggtgctgcgacgcaacatgacgcaaaagaatgccagggtaggcagggcaaaccattcgcccaggtgcctgtaggtgtaaagacgagcgtgtcgcggcatttcggcaagcgagtattcgatgttcaccttcgcctggttaccgatattgttcgtgaccgggccgatcagccctatgccggggttatggtccaggtgattgcgcagtgtatgcgcccaccccggcgtgacctgggtgtcgttgttgagcagcacgaggtagtcgccggtggcggccgcgagtccctggttgttcgccgcggaaaagccgcgattgtccgggttgaggatgacgtggtgcccgtggacgcgggcccagtgttcgagaaatgcgggcgtgccatcgctggagccgttgtcgaccacgataatttccagtgccgcgctcttgggatcggcaagcaaactaccgaggcacgcctgggtgagcgccaggttgttgtaagtcaccacaatcacgctgatatcacgggcacgtcgtgcgggctcagtggcgcccagtaacgcctcaagtcgatgggcccaggactgggacgcagcgaatgccctgcgttggttgccttgtatgcctggcggttctgcgagcgcctgggcgacgccgtcgatgaacgccccgggtgttcgggcgcgatagacccactcgccaaactggtgggcctcagggagatccacggtcaccacgggtttcccggcgctgaggtactcgtagactttcagtgggttggtggcgagcgtcagcggtgtaacccgaaagggcaacaggcacacatccatggcatgcaggtagtcgggaagggcgctgtaggcgacctcgccagtgaacacgacattggggtattggccgagcttgtgttggacgtgggcggtgtcggcaccgatcagcagtatcacatggtgtgcaaaggcttgggccgtcgctgcaacgaggtcgctgtcgaaccagtcggcgattgcgccgtagtagccaatgatcttgcgaccttgcgggtcttggtagaccgaggcgggacgccgcgagaggaactcgtagtcggccgcgttccgtaccacgatgcgttgttgcgacgccacctgttcccattgttgggcaagccagtcagaggtgaaaataatggcctgggcttcgcggaccaattgttgctcaagccctagaatccgagcgtcgttgttgccgaaaccttggtgatgatcgatgcagtcatacaccagtcggttgttcggcgcggccttggccacttcgagccagaaaggatgatgaaccagtgagactgtctcggtgggctgagtagagagcaacagctcgccgaggcctgttcgcaattgcgtcacctgggccggggacggcgctgtcgagtagatggaaggtactttgctgaggcgcaggcgaatttcgaacaggttcccccgttcatcaagcgggcgtatggaaaacccgggggactgggactcttgcaggctgctccccacgtagaaaacccgccgcccgctggcactgagcgtacgtgcgagctgttgtggccgctgatgacgaaaatcccagtcgatcaccccccagatgatgtagtcgggaccattgggggccgctagcatcaccttgagttgccgacgtgagacgctgccatgcagcggtcggcgtaaccacgtgaacaaccggttgtggaggcgcgcagacagccaccggcgaagcgccctgggtaacggcagctggcgataacaagtgcgcaggcgctcgatcagcgtggctttagcgcccgtcatggccgcgcacctcgtattccgggtagtcatgtaacggtgtggtatcgccctgcggccacatggagctgatggagcccggtcggtagaacgtgacggtgacactgcgccgggacgtggggctactgtctatcactcgggaaaccgcatgccaggagttatcgctgcgaaccagcaccgcggagttaccgatcaagggctggacctcctcgatgatgtgggtggggtcttgggaaccgagaatttgcaagcatccgccccggcatgggtgccatgattcattgaaatagagaatatgggtgacgaccttgtcgggcaggtcggggtgggggccgaggttggcgcccgggccatagtgaaacaggttggcttccatgggggcgtcgtgcagatcgataccggtcaacagcccgagtgcccgtcgataggccggtaaagtcagggtttgtgcgagctgcagccactgcgcgctgagcgcctgggggttagccacttggccattagtcattgaaaccaattgcctggcttcgtattcgtagtttttctcgccgccatagcccttgaccactttgaagtgatcgcgagggtaggtttcagccagcgccgtggcattttcgtggctatacaggttgccgatttgtgcccagtggaacggctggagctgtaacggatggtgggcaattttttccaagtcgatcattgagcattccttgccataaactttttgaatcggtgaaaaacaccacgcccatctgcctgggcgagttggcgcctggcgtccctgagctcaccttgttgtgtttgcatgttttcgaatactgcgggcaaggactgcaagacgcggttcatcacctgcggctcacccgctcgacgggtgacaatgagttctgccacctggtcccagtgctcgtgtagctgtttcaccgcaagttgggtggctggggacaatggctgcctgccaagttgcgcaaaaaaccactgcgggtcgagcggatggtcatgacgcaactggaagacacgcccataagccggtaacgctgtgaatttccccgtatccaggtgcgccgaacaaaacaccggtagaccaaaggcgatggcactgatggctaaatgataactgtggcctatcaccccaaccgaatgagcgatcagctcagcgagcagtaaaggtgagggccagaacggtaacgtcatcgagcgatcaagcgtcggccctagtgccgacgcatgatcgccaagcaccgggccgatcggcaggatcagcaactgcacatgcgccaacgcaggactggcgctgcgccaaagatcgaggaatgtatgcaggccgtctgcggcgtgtacgacgaggtaaggtttatccagctcgtattggctcaagaggtcgcgcagttgcgcagatggccgctgtacatccaccagttgggccaggccgaacgctgtatccggcagcacctcgatgcgcgcgtgttggctcactgactgcaaggccgtttgagtcaaggcatcacgcactttgacatgcgggctgtgttcgatggcaagtgccagtagcggcctggcccagtcagggacgtcgttgcaatgcatgcctggcgcgttccagatcaagggaacgccgtgttgcaatgccatcagggcgggaaccagccaatagccggttgggtgatgaatagcgggatcgggcggcaggtagccgtcagcgacaaatttatcgaagcggatgatgaagccgccgccgatcagcgtggcatccaggctatgcgcgattgctggcagttcggtcagggaggtgactgcatagggccattctccgacggttttcccgtgataggaaaaccggtgcatcctgaccgcgcccaagcggcgcgacagttccgcctcggcgatgatgggaaacaacaggtcgccataattggccacgtcgaatgtgccgtggatcgcaatctgccaggttctggtcttatcgttagccaagtgaagtgccatccttgagatgctggccctggggtagccgttcgacgccgaggtcgacgatgccgagaaagtcgttgccgagtaccaacgtatcgaacgacaagagcgcgacctgtttttcgatcagttgggcgctctcctcggtatggccattcatgagtttcaaggtgatgtgatatcggccggcggcaaagcgcgaacggaaccgagcggtaagggaggctttgcaccagccgtcatgcggcggttcgcgcaacaacttcaggttggccccgccgatcaccagtaaacgcggttcctgaatagtcaggctgatacttggcaaggtgatcgattcacgcaccatggcctccacccgcacctcaatcatgtcgtcgtgcacaaaggtggaatgcacttcctgggtattaacgaagtacgccgtgagaatgcgaccttcgtcagtaccaaaggcgatcccgtctttgttcgccaggtgcgcctttggcaccacggccacagcatcagcactggactcgcgacgttgctcatcacgcacatccagcaagtagcgctcggcaacctcctcgggcggcccgctggcgcggatttccccggcgcgcaggtaaaccgcccgtttgcagaagcgcttgaccatgttcaggtcgtgggacacgaaaagtagcgtggtaccgcgtgccgtgagcgcctccaaacgttgcaggcacttgaactggaacgaggcatcccccacggcgagtgcttcgtcgacgatcaggatgtcggggtccacccagacggacaccgcgaaggcaaggcgcataagcatgccactggaataggtcctggtgggctgttcgataaagtcgccgatgccggcaaagtcggtgatgtcgttgaagcggcgttcgatttcggcgcggctcagccccaggatggcaccattgaggaatacattttcccgaccactgaagtcggggttaaagccggagcccaactccagcaacgccgcgatccgaccttggcacacaacgttgccggtggacgcgctgagcgtcccgcagatcaattgcaggagcgtggatttaccgctgccattgcggccgatgaggcctattgcttcacctttttcgatggtcagtgtgacgtcccttaccgcccagagttcgcggtaatgcggggcctttccaggcaacagcagttgtttcaatcggtcctggggccgatcataaatccgaaaaaatttccctaggccggtgagctgcaccgcgatatcagaggacatcggcaaacccgctgcgcattcgctggaaaccctgaaagccaagccacgccacgcagcaggacatcgacaaacccagcgaccaggtcagcgggtcgatcaacttgccccagaacaggacatcccggacctgctcgatgatcaacgcgatggggttgagtaacaggaccgcttggtaggcctcaggcaatacgttgatggggtaaaacaccgccgaaacaaacagcagggccgtcgtcagtgccgtggtcacttggctgatatcgcgcagataaacgccaagcccggccaaaagccaggaaacccctagggaaaacaacaccagaggcaacagtaccaacggcaggaggagggcggtgagcgggggcggaccgagcagaaacaggtggaaaaccaaccagatgaccaagctcgcggttgtgtgagccaggacggaacccagcgatacccagggcagtatctccagggggaatatcaccttcttcacgtagtttgcgttctgaacgatcagggtaggtgcgcgctgcatgcactctgcaaagatattgaagaccaacaggccggcaaataccagcaacgcaaattcccctcgggattcgctcgcccccaaccacttctgtttgaacatcacgctgaacaccaaggtgtagaccagcaacatcaacagcggattcaggaacgaccacgccaggcctatcaccgatcccctgtaacgtcccaggatgtcgcgcttaatcatcgaactcagcagttcacggtgtgcccaggggctggaaaaaatcccgttcgatgccttcgccacatcccgtgattggcctcggatcgcgattttcattttggcttgcaagtgtcatccctgataagtcgagtactgttcatagcgtgtgccaacgaaaccttgactctcaaccgaggtgtgggctgttaccgttggcacatgactgaaagtagttcaaaaaggggaatttacaaatggcgtgcgcagcggacgaaacctttgaagagaggctggtcccattgaagcactgggggagggggcgggggatagctgtgtatcgagccgttcccaaggctcttcattgccttattcggcgtcaatgcggcacgagcagagccctgtagatcaatggcttacagggctgccgtgagtgatgaactgtgtcagggttattcttttacatccatgaactcttccgcccacgccacgtagctttccggcaacgtgtacgtgtgcgtcagttcggtggcactgaggttatccgtgctgtgggtcaactgacgttgggcacgcaggctgtcatacgtcgccttgatcgcggcgaagtaagccccatgaccggcaaccactatgcgcacgccaaggctggccagacgctgggcgtcattcagtttggggttggcgtaggtcaccagcatcagtggcaccgtcaggttttccgcgatcttctccaagtgcacgaaatcggccacaccgaccatgcaaatcccgtcggcgccggctttctggtaggcctgggtgcgttcgataacggcttcggtcggcaacacgccggcattggtccgggcaatgatcgacaactccggatcgacacgtgcttccagcgccgcgcggaccttgccgatgccttcttcaatggagatcaggtcggtggacttgcgcccgaactgcgccggcagcaacgtgtcttcaatggtcaacgcggccacaccggcacgctcgagctcttcgacggtacgcatcacgttcagggcgttaccgtagccgtggtcggcgtcggcgatgaacggcaactgggcaacgcggccgatgcgggtggcttgctcaacgaactcactcagggtgatcaacgcaaaatcgggtgcggccaatacctgcaacgaggcgacggagccaccgaggatgccgacttcaaaacccaggtcagcggcgatacgcgccgacatcgggtcgaagacggaagcggtttcaacgcaggttggggtggcaagcaattcacggaatttgcggcgcagggctgagtgagaaatctttggcatgggctttcctggttctgggcatcgtcttgtgacgatcaatgtctattcgtggtggggccagattaacatgcgggcgggggggagatgatgacgtttcagcattagggcaggggctggtgcatggagcgtgggtttacggtttgggggggacaggcgcccggggcgggcgccgtcctttccttcatgcctgttcttgatagccttttcgcagtttctccgcgatcagtttctctgcttcacgcaacgcgcgttcgggactctccagggatttgatcaaggtctggcccttggtgccgatgcggccgaaactcaccaccacctcagcctccgtgacgccgatacgccagaatttattagagttgccttcgccataggtgaactcgcgcatcgacggcgccgcttcaggggttaccgcaggctcggcttcgatctcgacggtttccacgacctgttccagcgctggcagtgcaggcgcttcttcaccccgaagcagcgcttcgatgcgcttgagcacttcctccggatcgcgcagccagtcatggctgagcacgtcgatgatcctccagccgaagctgcgcaataccgtcgggcgaaagatataacgctcacgcacgtcagtcgcggctgccgtgtcgctgtcgagcagcacccccagactgaagtattcaccgctggcgtcactgatcgccaggtcacagcggaactgtgaacgcccgacatattcctgcaccgagtgcccgcgttggcgcaacgcgacggcgagggcgctgcgcagtttgtccctaggcaggctgacggcaaaggactgcttggcgcccgggttgaggttggccaggatgccctgggagcgcggtgcatcgccgctggcactggcctgggcgaattgcaggaacgcgcgcaatgcggcggcgccgtcgttatgggtgttggtgatggcctcggactcaatgctggcgacaatcgccatgcgcttgcgcgcacgactgaagatcacgttaaggcgtttttctccgccgcgctggttgatcgggccgaagttcatcagcatcttgccgttcggtcccggcgcatagcagatgctcaggatgatcacatcgcgctcatcaccctgcacgttctccaggttcttgacgaacaggccattgaactgcccggcatcttcacgcacgtactcgcgctcaaggcgtgtggcaaaggccgaatcattgctggccaggtcttccagagcctgctcgatggcgccttgctgggcctcggaaaaggccacgatgcccaggctcaggccggtctcgcgttgcagcagttcacgcacgaggttggcgatgtagcgggcttcggccaggttgctgcggctgaggtagacgccatcgctcatcttcaagaagctgatcgggctgtcgagcagcgtgtcggcgccctggatcacggcctgggcgtcgctggagtccagcgcggcgtgggctggggcagggcgctcgatacgccggtcgggaatggtgatcagccgcccttcgtagaacgctgcgttggagaaactgatcagcgcctcgtggcgactgcggtagtgccaggccagcagggtcgccggcaagttgcgtgcggcctggctcagcaggctgtcggcatcgaggttgattgcgatctgttccccgtcctccatggcaatcaggtcgttatcgtcctggtcaccggcactggagaagaagttggtcggtggcaactgcatctcgtcgcccaccacaatcacctgctgcgcacggctcagggcgggcacggcttcttcgctggggatctggctggcctcgtcgaaaatcaccacgtcaaacaggtccggggtcaacggcagggtgtcggacaccgacaacgggctcatcagccagatgggcttgaggtcgttgatcacccggccactgtcgccactggccatttcgcgaatggagcgatagcgcatggtcttgcccagctcatgttccagttcgcggcggcccttggcataggctttcttgaactcgcgggcctgggcgtccagctgggtcactgacatcgccgattgcttcacatgctccagaaatcgctggtgcagggtggcgctgagcacgtgagcgttgctcttgagcaggttgctttcggcctggctgacctggcgcgcggccaggctcaaggccggaccgtcaaagcgtgccatctgcggattggcacggtacaggcgggtcaggttttcctgggcaatcaacccgtccagcacgggttgtggcaaagcatactgttgcacgaccgccaggcagccgggatcggcctggtgcagctcgttgagcaggggcagggtgtcgggcagttcgtcgagttcttcacgcaggtcgcgcaggtattcggccagctcggccaggcttggcgcggcgtcgaacacacactcttgggcaaccagctcggccaggcgcgcgatgggttggcgcaggctggcttcctggcgcacaacgggcaagctgctcgggttgccccgcaggccttcgacccacttgcgcaacagcggtgatgcgctcagttgctgcagcaaggcttgcaggttgtgcacgaacaggtcgatatcctggatgccgtagcgaccttgcaggcgttgctgctcggcgtgcagctcggcggtggcgcggtgttcaccggccaggttgtcgagcacactgcgcaggctggggcgaatcgcgtgctgactgaagtcgtagcggcgttgaagttcgccacgcaggcgccaccagccgggttgcaaccagcgcagcagcgagccttcctggcgctgtacctgctccagggccgcctgggtgtcctggggctcaagtttctcgcgccagtggcgggtggtttcacgggcgttgtgttgctgcacggccagtgcctgcaagccggcctgttcggcgtgcagcgcttgggaacccgttgagccaggttccagcaggtcgaggtgagccgccaggttggcgccggtcagttgctcggcggcttgagtcagcacgcacgcatccgtcagacgcgtgtcaccggacagcaggctggaggatgactccaggaacgactcgacgctgtccatcagcccactggcttgctccagaaacgccttgagctggccgtaggcatgctcgtgggtgaccaggcttgaggccaggtggctgaaggggtgacgcgcaaaactgtcgaggccgaagcgttccttgatggtctgatacaatcggccggtcagctcctgttgtgcctgccagtgccgccattcgggcaagcgttccagcgcttcgggcggcagctgtgcagtaacgggtggcagctcgatcaaatgacggaccaactcacgcaccgaacaggccaaggactccggcacgccggccatcgcctgttcaaagcgctctatcaggcccagttgctggctcagggtcgccagcgtggcgtcacgccgagcttgtaactgcgatgattgggcatcaccggcgatccagcgctcataacactcacgcaggttgcccacgaaggctttcttgtcggtctgggagtcgtgaatcaggcagcacaattcgcccagttcactctgttgcaagcgatggaacaccacgtccagcgccgcacgcttttcacacacaaacaatacgcgcaggccgcgcgcggcgtagtcggcgatcaggttggtgatggtctgggacttgccggtgcccggcggcccctgaatgatgaagtgacgcccggttcgggccaggctgacagcggcgttctgcgtcgcatcaccggccaccacgttccactggtcgggcagcgggatcgggtctggagtctggacttcgacgtctcgcggctcaatcgagaacatccggtcaaacgcttcgttttgcgcgggctcatcgatcagctgtgcgtagtcacgcaccagcgacatcttgcgatagttgaagttggccagggtcacctgggtcaggtcgatgtcccaggcgtagcggtgcccctgattctcgggcatggcgaaggtgctgttctcggtgctgctggcgaccatctgcggatgctggttgcgcagcacaggtttggcgccgacggccaggcgcaacggtaactcgctgggcagcaccttttgctggaacaattgcaggcccagcgggcggtagtcttcgcggtcgtagctgaaatccggcctgaccaagggcatcgccgaatgctgacgggcgcgacgacgctggaagtggtgcagatgctgcacggccttctggtggatcagttcgatttgcggtttgctttgcaggcgcaactcgacgccgggctcggtcagcttgatctggcgcgcaatatcggcgtggatttcctccagggacgtcttttgcaggtcgacggtttccggcaactggatatcgtagagctggcgcagttgatgccgcagtaccgggttgaactcggcttcggtctcatcgcactgcaacatgaactggtcgcgcacaccctttttgcggctcagttccaccggcagccagagcaggggagtgacgatgcgttcttccggcgtgtccttgaggttgtgccagcgcatgaaggccacgaccaggcgcaggttgctgaagccgaactcggcgcggtcgcggcgggtttcctggatgatgcgttccagcgacgcctgcaaccaggtctggtcttcaaaccgcaaccattgctgcaggccaaccggtttgccgctcaacacctgctcggagaagccaccgaaggtaggctgccaggtgcacaaggcttcggggcggatactttcaacgcgcatcaccaagggcacgctggccacggtcaagttgacgttggcttgcgttggccggaagtacagcaggcgattgcgtcgcgaaaggtcaaacaagcggttacgcagatgctccagcaccacggtgcgccgtgaagccgggccttcggcctgggccaatacacgctcgacatccaggctggccggctgttcgcgccaggattccaggcgccgcaccagtgagccgacatccgtggcgcgttcatggcggttcagctcggtcatttcaacgatcaaattggccagcaccgggttgagccggccgttgagctggaacaggttacggcgatgccgggcaaaggccttgaggtcgttgatatcggcaaaatccaacccgcacgccaggcaggccagcaactggccgagctggaaaatatcggttatctcgtcgtggtgcccgaggcgatgctcccaactgtgcaggtcggtgaggaacaccgggtggtcaatggtctgatgcgggtcttcctggacttgcaggtcggtcacggccacgccactttccgaatcccgggtcaggcggaccttgccgacaatattcagtgccgactccggattaggctgcacctgcttgatcgcttccaatgccagccgtggcgagacgccttcgggattgcgcagttgcagcgtgcgttccggcccttgcagcacatcgagataactgagttgggcgacacgtcccagttcatgcaattgcgcaacctggcgcagtaacggcagcgccaggaacagcacatcgtcgatggggacggcgacgccatcgtgggtctgcagcaattgcgtgaaattgatgggttgggttatcgggtccatgtgtcgacctccgctttgagcgcgcgaacgatcgggtcgagctcacgtttgggtaatttgatatcgcgcttgagcacgttgataaagtcgtcgctactgccgagcttcttggcggtgcgcgccgcgtgcaacaaggcctcatcccgcaggtcgcggtccaccaggctcaggtcgagcatgatgaagtgcaggtattcgtggatgcttgcgtcgacacgctcggcattcagcgtgcccaggtccagcgtggtttcgttgtctttccagtcgggaaagaatccacgtacctgattgagcaccacctccgattgcagcacggaggtgccgatgaagctggcgataaagctgcgggtgagggcggtcagctcgacttggccgatcacatccaaacgactgagcgccagcggcccgcgcaaccggccatgcagccaattgtcggtatccggcacctgccgccaccagctgtccaccgcctgggagcgcagaaacgtctccgggtgcgaaacgccttgggacaaccgtgcatccttgccatccagctcctgggcctgcttcaggtaactggcggcatcgacgctgacgatcccggtgtgaatcttgaccagcgaggtaatcgacgcttccggcccgccggccaccagggccgcgcctcggtcggcatagatttcggtgtgcaggctatataaacgcgcggtctgttccaggctcggaggcgtattcatatcagccatggcgtgattgagaatccgctcggcggtgagatagtcaccaccgtgctcagaccataagcggtaatgggccagctcatgcccgagcagcgccagtaactcctgagcgtcgagccgttcaagaatcggtccgtagaacaccacatgcacttcaccggccaggtaatacaggctggcgttcatcgcgccgtcgccggcttggtaaagcgtcgcgggcgcctggatctgcaagcattgcagcgccgtctcacaggcctgataggcctgcgggtgggtctcggggctcaggcgataggtgtcccgcagcaactgtgcgcgcacatcctgggcatgttcctgctggacgcccagagacgaggcccattcccacacaacaggctcatgggttttcagataatcgaccacacgctggtggtaaggcaagggggtcaggctgctgatatccagcgcgggggtactcatcgttcaaacgtccttgagaggatacggctccatagactgcgactgtgcagcagagacttgggcgggcatcccggtatcagtgatcggcaatagaggcggagcatacctagggggtaggaaaattacttgtgaaagtgcttggatgcgtggccagctgcaaatgcagttagagtggtgatgattatcttgatcgctgtgtgaaaaatgaatgctccgctttttgtttctctggatggccccaaaggcaccggcaaaaccacgttgttggaggctgtaacggcggcactgagggcggaaaacaagaaagtcattcggctttgcgagcgaaaaagcgacccctacaggggtgaaaccatggccctggtcaatgaacttgccagaaatccttcacgggatttggaatgggctgtgtgtgagcgctttgccgagagtcgccgctggatctcccggaacgtactgactcggcagccgttgggcagcattatcctgattgatcgctggtatccctctgaggctgcgtttcgacacacgataccgtttgcagagattctgcagttgaacctggagctaagcgtgcgagtgccggatctgcatgtcggtgttgtcaccgcgccggatatttcatgggcgagagcaacggcacgatcacgaggattgggcggcacagtgattcagaagtatgcagagcatgttgcgtgtaccgaaatgttcgagcaggcggttgtgggtcagggctgggtgttatgccgtaatgaaggtgcgattgaagaggctgtgaagcaggtggttgttgagattcgtaaagtggctgggtgatacgtgtagcgtaatacatgatttaacataatatacattatgcgtaacataatattgcgtaatcaggggcagtgcccgtcagatttcaacaggcaaaaccccctgtcagattcaaacctgagcaaagcctccatcgacaaacatttcactgcccgtcatgaagctgctctcatccgatgccaggaacaacgcggcggctgccacttcttcaggctgaccgatacggcccagtggcacctgcgccgtcatgtcgtcgatgatcgcctccttctggcctgtacctgacaacgccgagtccaggcctggtgtcgagatcggtccgggtgaaagtacgttcacgcgaatgccggtgcctttgagatccagcgcccagcttctggcgaaattacgcaacgccgctttggtggcgctgtacacgctgaacgccgcggtgcccattgtcccggtggtcgagccagtcaggatcacggaaccgccggcctgcatcagtggcaaggctttttgcacggtgaacagcgtgcctttgacgttgatgccgaacgtgcggtcgaacgattcctcggtgatcgacccgatcggttggaaatcccccaggcctgcattggcaaacagtatgtcaacccggcccttggcagctttgacctgggtgaacacacggtccaggtcgtccagcttggcaatgtcggcctggatggcgatggcgtcaggcccgatcagctccagcgccttgtccagctctgactgtctacggcctacaatcaccacctgtgcgccttcagctgcaaagcgaatcgcggtggccaggccgatgccgctgttgccgccggtaaccactgcaacttttccgttgagcttgctcatgatgactccaaaaaagaatgttgaggcgcaactctagatccgctctattcttttgaatagtatgcaccttttggtaagtacccttggaggcacctcaatcatggccaataactcattcaattgcgggctcgaggcggccctggcggtgattggcggcaaatggaagccgctggtgctgttcaacctggcgcagaatgttcatcgatatggagaattaaggcgcgcgattggtggtgtgaccgataaggtgctgatccagcaactcaaggagttggagcgcgatgagattatttttcgcgtggacttccaggaaataccgcccaaagtcgagtattcgctgacgccgttcggggagtccctggcgtcggcgttgggtgggttgtgccaatggggtacgcagcatatgcaaacggtagagcgcatcgccgcacggcggacgtctgccctctcccaatcctgagccccctgccctgatgcctaactcaactaaatgactatttagttgagttaaatcaatggtttacaactgaaatcgatcaaccgactgcgacagcttgccggccaggctggacaattcgtccgttgttgacgctgtctggccaatgacccggctgttgttttccgacatgccggcaatcatctccacctggtgcgcaatttcattgctggccaggctctgttcaccgatagtgcgcgagatatcgttgaccatctccgtggtgttcagggtcgcttgcaaaatctcgcgaatcgcccgctccacctcggtggttaccgccatgcccttgtccacctgagccacgccctcctccatgctggtcaccgcttcgcgggtactttgctggatacgctcgaccatgctggcgatttccagggttgaggcactggtacggccggccaggctgcgaacttcatcggcgaccactgcgaacccccgcccctgttcaccggcgcgggcggcttcgatcgcggcattcagggccagcaggttggtctggtcggcgatccccttgattacctggataatgctgaaaattgcttcggactctttgtccagcgtgcggatcacctgggccgactgctgcgcggagcgggcaatgccgcccatgtcgttgaccacctgatgaatcacccggccaccgtccttggccaaggtttcggcctggttggccatgtccaacgctcgcccggcatgccgagtgatttcctcgatactggcggtcatttcactcgcagccgcggccatggtgctggccgccgcactttgttgctggctgctgccggccacttcatggcagccgtggctcagttgctcgctcatgccattgaccccgtgggcgttgctgcgcaccacttcgatcatgccgcgcagatcccgttgcatggtggcgaggctgcgaatcaatgtgctggcttcatctttgcgctggggttcgacaatcatttcgctcaagttgccccgcgcaatgctggcggcaatacggctggcagcctgcaacggccccatgatgctgagcatgacccagcggccctgagccaacagcagtaaaaggctggcgagcaacaccacgccgagggttaaattggcgttgctgatggtctgctgtgtaccgaggctggtctgctgggtgttggtctcgatcagctcgctcagcgcggccatttgatcttcaagctgggtgaaggcggtgttgaacgttcccagttcattgcgtgcggcgtcgggattgtccagcgccaaggcgacaatgcgctcaccggcggcaatgtagttgtccaggctcggtttgattttttccaggttcgccttgagcgtgtcgtccaacggcagcttgaggttgtctgccagcacctgccgaaagtgctcagcgtgatccttcagggagctgttcacctgcgctttgctgctggtgcttttgcccaggcccaccagcatggctgacagtacatcggcacgcagggcgtcgtgcatcatgtcggcttccatgtgattgcgcagcaccgtcatgctcaactcgttgtcctgcacggcattgcccatccgggtatttcccaggtagccggcaaggctcatgatcaaggcggtcagcaatccggtcgcaatcaacaacatcaagcgcagtttgatcgtcatgcaggtatccccatagcctggacagccggttgggaacccaaccgcttgagcgtctagtaccgttatcggcagccgttgcttattagtgaagcccaagtcagggaatctgcgcgattcccttgtgctcgcgtgcaagggcagctctttgcctcggcgttatcagggctacatcgaagttgtaatgactctgtaagcgtcatcttgtacagccgcaggcggaccactaagctggccgatcccttgaaggtaccggaattccatgtctcgaagcattgcccacctcgccctcctcctgggcttgatcaccgccgtcggcccgttcgccatcgacatctacctacccgcgctgccaaccctgggcgccagcctgcaggcctcgccggcgctggtgcagatgagcctcacggtgttcttcgtcatcgtcggcctgtgccaattgttctacgggccgatcagtgatgtgttcgggcgcaagccgccaatctatgccggcctggtgatttttatcgtgggcagtgtggggtgtgccttggcgccgaccatcgagacactgatcgcgtttcgtgccctgcaggcgttcggcgcctgcgcgggcatggtaattccccgtgccatcgtgcgggacctgtacaccgggcatgaggccgccaggctgatggcgttgctgatgctggtgatgagcgtctcgccgatccttgcgccgttggccggcagcctggtgattgcgctgtggagctggcgtgaagtgtttgccgtgctggcggtgctggcggcggcgtgcctggtgatgaccattgtgcaactgccggaaacccacccggccgaacgccggttgggcaagaccctgggcaacgccttcagcagctatggcgcattgctgcgtgacccggtattcatcggcctgtcagtggtctgcggttttggcctggcgaccttcttcgtgtttatcggcagcgcgccgttcgtgtacatcgagtactacggcctcacacccacgcagttcagcctcggctttgcgttgaatgctgcgtcgttttttgccatgagccaactcactgcacgcctcagtgcgcgctttggcctggcgccgctgattcgttggtcggtaacggccgtggccgccgtgatggccgtcctggcggccacaacactgtggctcgacagcctggccctgaccatgaccctgctgtttatcggcttcggctttctcggcttgctgctgccggccgccggggtactgtccctggaggatcatggcgcggtagccgggtctgcttcagccctgctcggcgcgatccagatgatcatcggtgccgtgtccatgaccctgatcggcgtgttcgccgatcacacgccggcgccgatgctgatcggcatagcgctgtgcgctattgcggcgctgttgaccacgctgtggaccttgcgtcgtttgccagcgcatttggccaacaacccgccctccccctgattcatcacaagtcaaaccgatccaccgcccgccgccgctcattgtcgtcacgcacgtcataactggcggtggtctggatattggtgtggtgcgcgagcttctgcgcgatcgacaggtcatgctcctcgatcacccgggtgatgaacgagcgacggaagtcatggggcatgatcttcacccccacctgttcgccgcgctggcgggcgatgtagtagatggcatgtttggtgatgcgctcgcgagtgatgtggctgccacggcggatacggttgaacaggaagctgtcatcctgctcgccctccttgagctgctcgcgccgaaacgccagccacgcctgcaatttggcgaacgcccagtccggcgcgtacttgatcaactccttgttgcccttgccgatcacccgcaggctgcgttcttcaaagttgatttgcgccaggtcgaggttgaccgattccgacttgcgcatgccggagccgtagagtatgccgatcaccgcggcatcccgcaggccctgggggcgtgggtcggcggcgcagacttccatcatttcgcggatcaggctgcgccgcaggttgcggccctggcccaggcgcgtaccgggtgcagccttgacggtgcgcatgcgcagcaggtgctcctggctgatcaggttcagacgccaggcttcattcatcaccccgcgcaccgcgttcacatacaacgaggaggtattcggtgcataaccgtcctcgcgcagggcggcgaccagggcgatgacgtgttcgggttgcagcaagtgccagtcgatgtcttcgaggttgatatcctcgaagcccaggcggtcggccgcatcttgcagcacgtagcgcatggtcaattggctggagggggccaggcgggtgaggtatagggtcagtgggttgcggatagactcagtcaaggtagatcagcctttggattaaatacctcgaacaagcctttgtttaatcgaggtatttagtgaattggcgagggccgagtctaacccaggaccagccccggcacaaaatcacggggccgtatcgtcgtcctcggtgggctcctgaggctggacctgggtctggctccactcgctgtcctgcttctgcatcaatgcgaaccagtgctggcgcatgaacgtcaggtacgcctccggcgccttggcaaagtccttctcatcgccataacaccccggcaacggcaattcggtgccctgctccttgtactgactgaccagcgcctgctgcgcggccacgctgcagtccttgggcagaggcatgccgcgcagggcgccggcctcttcgtcccaccaggccgcaccgacgcggtcgaccccgcgcagacggtacttctgcgacttgccgacatgcatgatcaacttgaattcgttggggctgacgtcgctggtgcaggtgcgcgaatagcccacggtggcctgggtgatgccgtcgccagagaggtcggtgactttggtcgcagccctatcaaagcgcagggatgcgtcgaattcgcaatgctgcacatcgtcgtagagcatccacacgcgtttggggcggttgccgtcgatcaggtactgggccgcatacacgaacgccgactgggtgccatcgtcatcgcgctcgctgacttgctcggcgagcaccagcaggttcttgccttgtttatcgtcccaggtatacgcagcgatctgcttgccgcgcacttcgacaccgtccggcacctggtcgatgctggtgagcgccactccgtcatccgctcgtacgctggtgacacacgccacgctcatcaacaaccccatcaacaccggccgcaactggccgcgtaaaagctgcacgctattcatccgatcaccctggcaagagacggcttactttaccggcacttgcagggcattgcagagaatattcttcactgaaaacaggattgaataacattgcgtcgcgatcccccccggcgccttgtgcagcaccgcgtccgcttagctgaaccctagctgtctacctgtcaaataaacgagtttttcatctgcgtttcatattcgtactacatttttacgcttaatcttgcccttgttgacttgagggccatccgcgcttctccaactaacccattgattccgctttacctttacgcaatatcgtctttactgcagttcaccaggaagaacacacggccagcgctcaggaatgtcgaatgaacaccacgcacaccactgccttttaatcagttgcctgtactttcgcccactgattgctgctgtttcagcgctccaagttgctctaaccccgaggtcatgaatctttgaaaccctaccctattcattgcgtgtcgatcgttatcccggtctacaacgaacaagagagcctgcctgaattgctgcgccgtaccaccgcagcctgcaagcaactggcctacgaatacgaaatcatcctggtggatgacggtagccgcgacaattcggcccaactgctggaagacgccgccgctgaagacggcagcaacgtggtcgcggtgatcctcaaccgcaactatggccagcatgcggcgatcatggccggtttcgagcagtgccggggcgaagtggtgatcacactcgacgccgacctgcaaaacccgccggaagaaatcccgcgcctggtcgaacaggccgccctcggttacgacgtggttgccaccgtgcgcaacaatcgccaggactcggccttccgccgctggccgtcgcgcctgatcaacctggccgtgcagcgctccaccggcgtggccatgactgactacggctgcatgctgcgtgcgtatcgccgcaccatcgtcgacgcgatgctcgcctgccgtgagcgcagcacttttatcccgatcctggccaacggttttgcccggcacaccacggaaatcctggtgcaccatgccgagcgcgaacacggcgaatccaaatacagtgccatgcgcctgatcagcctgatgttcgacttgctgacgtgcatgaccaccaccccgctgcgcctgctatcgattgtcggcttcagcctggcggcgctgggcatgttgttcgcctttgcattgatcatcctgcgtatggcctttggtgccgaatgggccggcgaaggcatgttcgtgctgttcgcggtgctgttcgtgttcaccggtggccagttcatcggcatgggcctcctgggtgaatacctgggccgcatgtacagcgacgtgcgcgcccgtccgcgcttctttatcgaaaaagtgctgcgcaaccaaccggcagcaccggctcccgtggtcgtcgtcgacggcctggtgtcctcccatacctctacttctgctgatcaggtctaatcatgagttcaaaagctgttgtattcgcgtaccacgatattggttgtgcaggcattgaagcgctgctcagcaccggttacgaaattgctgccgtgttcacccatgccgatgaccccaaggaaaacaacttctacggttccgtcgcgcaactgtgcgcccgcaacggcatcccggtgcatgccccggaagacgccaaccacccattgtggatcgagcgcatcgccaagctgaacccggactacatcttctcgttctactaccgcaacctgctcagcgagccgctgctggccaccgccggcaaaggcgcgttcaacctgcatggctcgttgctgccgaaataccgtggccgcgccccagccaactgggtgctggtcaacggcgagaccgaaaccggcgtgaccctgcaccgcatggtcaagcgtgccgatgccggtgcgatcctggcccagcagaaagtcatcatcgagcgcagtgacaccggcctgaccctgcacgccaaactgcgcgacgccgccattaccctgctgcgcgacgccctgccgcaactggcccagggcaaactggccgaaaccgcccaggacgaaagccaggccacctacttcggccgccgcaccgccgccgatggcaagttggagtggaaaaagccggctgaagaactgttcaacctggtacgtgccgtgacccaaccttacccaggtgctttctgcgccgtgggcgagcacaaactgatcgtgtggcaggccgaagtggtcaagggcaacgaaggcctggcccctggccgcgtgatcagcgtcaacccgctgcgcatcgcctgcggtgaagactccctggtggtcaagttcggccagcgtaacgccgacggcctgttcctggccggccccgccctggcggacgcactgggcctggtcgacggttccgtactgcgcggcgccgagtccggccgcaagcctcgtcgtacccgcgtgctgatcctgggcgtgaacggttttatcggtaaccacctgtccgagcgcctgctgcgtgacgaccgttacgaagtctacggcctggacatcggttccgacgccatcgagcgcctgcgcagccacccgaacttccattatgtggaaggcgacatcagcatccacaccgagtggatcgaataccacatcaagaagtgcgacgtggtcttgccgctggtggccatcgccacgccaatcgaatacacccgcaacccgctgcgtgtgttcgaactggactttgaagaaaacctcaagctggtgcgctactgcgtcaagtacaacaagcgcgtgatcttcccgtcgacctccgaagtctatggcatgtgccaggaccagtacttcgacgaagacacctccaacctggtggtcggtccggtcaataaacagcgctggatctactcggtttccaagcaactgctggaccgtgtgatctgggcgtacggcgacaagggcctgaaattcaccctgttccgtccgttcaactggatgggtccacgcctggatcgcctggactcggcacgtatcggcagctcccgcgcaatcacccaactgatcctgaacctggtggaaggcacgccgatccgcctgttcgacggcggcgagcagaagcgttgcttcaccgacatcgccgacggcatcgaagccctggcacgcatcattgacaacgaaaatggcgtgtgcgacggccagatcgtcaacatcggcaacccggaaaacgaagccagcatccgtcagttgggcgaagaactgctgcgtcagttcgaggcgcacccactgcgtggcaacttcccaccgtttgccggtttccgcgacgtcgaaagcaaggcgttctacggtaccggttaccaagacgtggcgcaccgcaagccaagcatcgaaaacgccaagcgcctgctgaactgggagccgaccgtggagatgagcgaaaccatcggcaacaccctggacttcttcctgcgtgaagccatgctcgaaatcgcggacaagaaataatgcaggcaggcctccgcatcgacgtcgatacctaccgtggcacccgtgagggtgtaccacgattgctcgagtccctggatgaagctggggtgaaagcgacgttcttcttcagtgtcgggccggacaacatggggcgccacttgtggcgtctcatccgcccgcaattcctgtggaaaatgctgcgttccaatgcggtcggcctgtatggcctggacatcttgctcgccggcactgcctggccgggcaaaccgatcggccgcgacctggggcacttgatgcgccaggccaaggccgccgggcacgaagtgggcctgcacgcctgggatcaccatggctggcaggccaataccgggcgctggagcgaggcgcagttgatcgagcagatccgccgtggcgtcgacaccctcagcgacatactcggtgagcgcatcgactgttccgccgccgccggttggcgcgcggatgaacgtgtggtgcaagccaagcaagcttttaactttcgctacaacagcgattgccggggcaccagcctgtttcgtccaaccctggccgatggcagtgcgggcaccccacaaattccggtagacctgccgaccttcgacgaagtcgtcgggccggtggtggctgccaaagacttcaatgggttcatcctcgaccgttttgccgcgtcgaaactcaacgtttatacgattcatgccgaagtagaagggattctgatggccaacgattttcgccatttgctcgcccaggccgggcagcgcggcatcgacttcaaaccactgggcgagctgttgccagcggacgtgaccaccctgccccagcaacagctggtgcgcggtgcgttgccgggccgcgagggttggctcggagtgcagcaggcatgatccgccgttgggccttgccccttctgctgttggcgtttggtgtgttctacctgctgccgctggctacccatggcctgtggattccggatgaaacccgctacgcgcagatcagccaggaaatgctgctgaccggcaagtgggcttcgccgcacttcatgggcatccgctacttcgaaaaaccggcggcgggctactggatgatcgcgctgggccaggcgatcttcgggcagaacctgttcggcgtgcggtttgcctcggccctgagcacgggcttgagcattctgctggtgtacggggtgtcgcgccggctgtggaatgacccgcgcaaaaccctggtcagcaccgtgctgtacatgagttttgtcagcgtggccttgctcggtggctacgccaacctggatccgcagttcaccttctgggtcaacctgaccggtgctgccctgtggttctgcttcgacagcaccacccgcaacgggcgcctggggtcctgggcgttgctcggcctcgcctgcggcatgggcttcatgaccaaaggctttcttgcgtggttgctgccggtgttgatcgccctgccctatgcgatctggcagaaacgtttgcgtgaactgctgggctatggcgtggttgccgtggtggtggcgattgtcgtcagcttgccgtgggcgctggcggtgcacctgcaagagccggactactggaatttcttcttctggcacgagcatatccagcgcttcgccggtgacgatgcccagcatgccgagccgttctggtattacctgccgctgctggttgcgttctgcctgccgtgggtggcgctgttgccgtccaccgtcaaacaggcgtggcgcgacaaacgcagcgcaaaaatcggttttatcgtgctgtggctactgatgcccctggccttcttcagcctggccaaaggcaagctgccgtcctacatcatgccgtgcctgctgcccctggccttgttgatgggcaataccctggccgacaaactggcccagggacgcagccgtgcgctgcgcatcaacggctggctgaacctgatcatcggcgtagtggcattgctcgcgctgacctgggtgcaattgaagaaaccggtgtacgagcacggccaggaaaccctaagcctggtgctggtgttcacctttctgtttgcctggatcctcgtcaacctgttgcaggcggcccggccgttgcacctgtgggccgcgccggtcctcggcagttggctgatggtggcattgctgcccgccgcgttgccgcactcggtggtgtacaacaagactccggaccaattcatcatcgaccacctgcaggaactgcaaccggccacggccctgttgagcaatgacctgggcgcagcgtcggcactgtcgtggcgcctggcgcgcccggacgtgacgctctacaacaccgtcggcgaagtcaaatacggcctggcctacgcggacgccacgcaccacaaggtggataccacccaagtccagcaatggatgagcattgcgcgccaaaagggcccggtcggcgtggtcatgcgggtcaagggcgatgacgaaatcgcagaagtcgacttactgcccaaggacggcaagcgctacgaacaaggcaacatcgtgatcctgatcttcccgcaggctgcgcaatgatcaccttgctgctgttactggccgcctgcctgttcacctgcatgggccaggtttcccagaagttcgccgtggaaagctggcgcgacctgccggatggctgggcgctgaaactgcgctcgccctggttgtggtcggcgctggtgtgcctgggcctcggcctgctggtgtggctgctggtgttgcaacgcctggaagtcggcattgcctacccgatgctcagcctcaacttcgtgttggtcacgctggtcgcgcgttttgtattcaaggaacacatcgacacccgccattggctgggtgtggcgctggtgatcggtggcgtcgtgctgctggggcgccaggtatgagccgggttcagggctttgccctggccctgggcagcgtcggcctggtcagtgccgcccaactgggcatgcgctggagcatgacgcgcctgccgctgcccagcgaatggctggacgccttcagccagaacagcatcgacctgggcgccctcggcgtcgtgaccctggcgatcctggcctacgcgctgtcgatgctctgctggcttggcgcgctcaagcatttgccgctgggccgcgcctattcgctgctgagcatcagctacgccttggtatacctgctggccgccagcctgccggtgttcaacgaacatttttccgtttcaaaaaccctgggggtggcgctggtcatcctcggtgttctggttatcaactctcgtcgtgctagcgccacaagtcccaggaatgccccatgaaaatcagtgtatttggtagcggttacgtcggtctggtgcaggccaccgtgttggctgaagtcggccacgatgtcatttgcatggacgttgacaagaacaaggtcgagtcactgcaaaaaggccatgtgaccatcttcgagccggggctggctgcgatggtcaaggagaacctggagagtgggaggctgcacttcacccatgatgaaaagttggcggtggaacacggcgaagtcctgttcattgccgtgggcaccccttcggacgaagacggctcggccgacttgaaatacgtgctgtcggtaggcgacgccgtggcccgccaccgcaaagagccggtgatcctggtggaaaaatccaccgtgccggtcggcaccggcgacaccctgcgcgcccacatcgaaaaagccctgcacctggccggccggcaccttgagttcgatatcgtctccaacccggaattcctcaaggaaggctcggccgttgccgactgccgccgcccggaccgcatcatcatcggttgtgagcgcgaagaagtgcgcgacgtgatgcgcgacctgtacgcaccgttcaaccgcaaccatgaccgcatcattttcatggacctgcgcagcgccgaactgaccaagtatgccgccaactgcatgctggcgaccaagatcagctttatcaaccagatcgccgagctggccgagcacctgggggcggacatcgaagccgtgcgcctgggcatcggtgctgactcgcgtattggctaccactttatctaccccggctgcggctacggcggttcgtgtttccccaaggacatgcgcgccctgatccacagcgccaagcaagccaactgctccagcgacctgctggaagcggtggaagccatcaaccagcgtcagaagagcaagttgttcgaacggatcaatgcgttcttcaagggcgacctgcgcggcaagacctttgccctgtggggcctggcattcaaacccaacaccgacgacatgcgcgatgcccccagccgcgtgctgatggaagccctctgggccgccggcgccaacgtacgtgcattcgacccggaagccatgcaggaaacccaacgcatctacggcgatgacccacggctgatgctcatgggcaccccggaatcgaccctgggcggtgcggatgcgctgatcgtctgcacagaatggcagcagttcaaggcgccggacttcgacctgatccaccagcgcctgaaaaccccggtgatcttcgacgggcgcaacctctacgacggcgagcgcctggcgcgcaaaggcttccagtactacccgatcggccgaggcgattcctgccaactgccgattccccagcagcaatgggtagccctgggtgcaggccaggtcgtggaagcctgagacgtgaacagagttcaaccgtccccgctgaatgcgacgattcgccgccaatccctcggtttgggattgctggcgttgttgctgtttatcgccggcaactggcaccaggcgatcattggcttcgactcgcgcttcgtgttgtttgcccaggaaatgctgcggcatggccccagcgtcttccccaccacctatgggcagccttacgcggattacctggccacctcgacactgttgacctggctggtttcattgcccctgggccaggtcaccagcctcacggcctggttgcccacggcgatcgcctcggcgtttatcgtcaccctggtttatcgcctgacggcgccctactccccgcgctgggggctgctgagcattgcgctgctgttgttgagcagcaacttcatcagcgaaacccgtgcggtgtccctcgaccagatgctggccgccatcgccctggcggtgttctacctgggttatgcccatgatcacttcggggcggctaaacgcctgcattggctgtacctgatgctgatcctggggtttgccgtgcgcgggccgattggcctggtgattcctacgggcgtgctctgcagctactacctgatcaaccgacaatggcgccagctgttcagtttcggcttgctggccctggcgctgctggtggcatgcgtgggcctgctgttgctgatggccaagttgagcggcggcgaaagcttcatgcaggacgtgatccgcatgcagttcctcggtcgcatggatggcagcgaaggctcgagcggcacgctgtactacttcaccagttcgctgggcaactacgccttggcgtatccgatggcgctgctggtattgctggccatgctgctcagcgggcgccgcgcgccgggaccggcattgcagttggtgtggtattgcgccgccgcgggcttgctggtgatggtcggcctgtcgattccccaggcgaaaaaagcacgttacgtgctgccgatgttgcccatggcggcgatcattgcggcgtacccgttccaggtcgcacacggacggctcttcgccgggctgcgtgggctgctgctggtgatctggacgctgctgccgacgctgttgatcatcggccttttattggcacgaccgcgctaccctgagcagttgagccatctgggctgggtgttcggcgtgctggcgggcctgcaggtggtggccttggtgacactcttcaagcgccgcctgcgtccggtcggcccggcctttgccgcggtactggcggtttgggccacctatatcctggtggtcgagccgctggagcgcagtatctacgacacccgcacctttaccttgcaggttcatgagcaggtgatgcagcagcgcgcgccggtggtgctgcatggcttgggcaaagacgccaaggccatcaagtacatggtcaacctcgactgcgaccaggtgccgttgttcactcagcaagccgccgacctcaagccactccagggacccgcctggctggtgatgagccaagtggattacgaaggtttgcaagacccgcgctttcggtccatcacgccgaccctgaccggcgaattcgaccgtaacccttacgtgctgctgcacctggccaaacctgtgcaaccttgagcctgcgccggcactgccggcgcggaaacttcccacacagctttacgtaataactgctgccgtttctctttcctgcgcccaaaacccgacggtaaactcgcttgcctggtgcggtattcatgtaccgccacaggtcatgggtgaccacaaggacgagaggacaacgccgtgccagatgatgcttcgcttgataacccagccttgaccagcaccgaagtgcatgtcggctacgttcccctgccaccgctggaccggctgatgggattgcgcgacgcgttggtggcgttgaaaggcccgctggccagtgaacccggtttgcaggagaacctgcgcaagcgttttttcgatgaagaactcactaatcgggtgctgggtaaagtctgctgttcgatagccgtctgaacgtattccaattcattatttttgcattcaaccctcattaatatgcattggcgcctctgttccacgcgcggcacactgcatgggttccttcccccaaatgttggaactttcaaagggcttttccgggcaaccagacaagccttttttttgcccgctgtttatggactgccttccaatgctcgctcgctggttccccgctgctatcaacacccgccccaccgaatggagccgtgccgcgatcggtatggcgcttggcaccttgttcagcgtctggttgtgctctcaggtgtttggcatggatgtcgcgctgcacctgcttggcccgctgggtgcgtcggccgtcttgttgttcgccgtgtcatcgggtgccttggcgcagccctggtcgattatcggcagctacctgtgcgcaggcgtgattgccttgctggtgacgcgtgtcctcggcccgtccctgggctgcgcctgcctggcggctggcatgaccgtggtgctgatgtgctggttgcgctgcctgcacccgcccgccggcggcctggccatgacgctggtcctggcagacccggcgtcagcggcgctgggttggtatgaattgggcgcggtattgctcggcgcaggtgcgctgctggcctgcgcactggcgtacaacaacgccacgcgcacgcgttaccccaaaggcgcggcgccagcgccggcacctctcccgttcaaccccagagccggccgagaccctgccattaccgccgctgatttgaaactggcactggcggacatggagcagttctacgatgtggagcccagcgaactggaagagctgatccacgccgcggaaacccacgccaggcgccgcagcatcggtgaaacactggccagccgggtgccttgagcccggcgcgtgcctactgcataaatgcaaaaacgacctgcaggattgaaggttgtactgggcaaatttgcactggtacgatcgcgagaaggttcatccgtgaacatcttgataaagaacaataaaagcagggagttatcgatgactgctcaggtttcatccgaagcaagccacgccgaaatacttcaggacgaagtcctcgccgaggtccgcaaccacatcggccacctcaccctcaatcgccccgccggcttgaacgccatcaccctggacatggtgcgcagcctggcgtcccacttgcaggcatgggccgatgacccgcaggtgtatgccgtagtcctgcgtggcgccggtgaaaaagccttctgtgccggtggcgatatccgctcgctgtacgacagtttcaagaacggcgacaccctgcatcaggactttttcgtcgaggaatacgcactcgatctggccatccaccactaccgcaagcccgtcgtggcactgatggacgggtttgtcctgggcggcggcatgggcctggtgcaaggcgctgatctgcgcgtggtcaccgagcgcagtcgcctggcgatgccggaagtagccatcggttacttccctgacgtgggcggcagctacttcctgccgcgtatccccggcgaactggggatctacctgggcgtgaccggggtacagatccgcgcggccgacgcgctgtattgcgggttggccgattggtacctggatagccacaagctcgccgacctggaccagaagctcgaccgcctgcaatggcacgactcgccgctcaaggacctgcaaggcgtgctcgccaaactggccgtgcaacaattgcccgatgcgccgctggccgctctgcgccccgccatcgaccactttttcgcgctgccggatgtaccgagcatcgtcgagcaactgcagcaagtcacggttgccgacagccatgaatgggcgctgaccaccgccaacctgatgctgacccgctcgcccctggccatggcggtcacgctggagatgttgcgccgcggccgccgcctgcctctggaagactgttttgccctggagctgcacctcgatcgccaatggttcgagcgcggcgacctgattgaaggtgtgcgtgccctgatcatcgacaaagacaaaagcccacgctggaacccgcccaccctgcacgggctggccctcagccacgtcgagagcttctttcatcacttcgagaaggttgcgaaataagccatgcaagacattgaatacacagaagaacaagtgatgatccgcgacatggcgcgtgacttcgcccggggtgaaatcgcaccgcatgcccaagcctgggaaaaagccggctggatcgacgacgccctggtcgccaagatgggcgaactgggcctgctgggcatggtggtgccggaagaatggggcggcacttatgtcgattacgtcgcctatgccctcgccgtcgaagaaatttccgcgggtgacggtgccactggtgcactgatgagtatccataattcagtgggttgcgggccgattctcaactacggcaccgatgcacaaaaacagacctggctggccgacctcgccagcggccaggcgattggctgcttctgcctgaccgaaccccaggccggttccgaagcgcacaacctgcgtacccgtgccgaactgcgcgacggccagtgggtgatcaacggggccaaacagttcgtcagtaatggcaagcgcgccaaactggcaatcgtattcgcggtgactgatcccgacctgggcaagaaaggtatctcggcgttcttggtgcccaccgcaaccccaggattcgtggtggatcgtaccgagcacaagatgggtatccgtgcgtccgacacctgcgccgtgaccctgaaccagtgcagcgtgcccgaggccaacctgctgggtgagcgtggcaaaggcctggccatcgcgctgtccaacttggagggtggccgcatcggtattgccgcccaggcgttgggcatcgcccgtgcggcgtttgaagccgcgctggcctatgcccgtgatcgggtgcagttcaacaaggcaatcatcgagcaccagagcgtggccaacctgctggccgacatgcaaacccaactcaacgccgcacgcttgctgatcctgcacgccgcacggctgcgcagtgccggcaaaccctgcttgtcggaagcgtcccaggccaagctgtttgcctcggaaatggccgagaaggtttgctcatcggcgatgcagattcacggagggtacggatacctggaggattacccggtggagcgttactaccgggatgcgcggatcacgcagatttacgaaggaaccagcgagattcagcggatggtgattgccagagagctgaagaactaccaactctgactgccaatgtgagaggggggcaagccccctcccacatttgatactcagtgtctttgacaccgggttatttgtctttgaactccggcgcgcgcttggccacgaacgccgccatgccttccttctgatcctgcgtggcgaacgccgcatggaacacccggcgctcaaagcgcacgccttccgacagactcacttcaaacgcgcggttcacgctttccttgaccatcatgctgatcggcactgacttgccagcaatcagcgtcgcgactttcagcgcttcttccagcaattcatcggccggcacgatgcgcgcgacgattccgcaacgctccgcttccactgcatcgataaagcgcccggtcaggcacatttccatggccttggccttgcccaccgcgcgggtcaggcgttgggtgccgcccatacccggcagtacgccgaggttgatttccggctggccgaacttggcgccgtcaccggccaggatgaagtcgcacatcaacgccagttcgcaaccgccgcccagggcgaagccgttcacggcggcgatgatcggcttgcggcggttggccacgcggtcgctgtcgctgaacaggtcgtcgaggtagatctgcgggtaggtcagctcggccatttccttgatgtcggcaccggcggcgaaggcttttttcgagccggtcaatacgatgcagccgatttccgggttggcctccaggccgtccagtgcctggttcagctcgctgacaagttgcgcattcagagcgttcagggcttgcggacggttgagggtaatcagcccgacgcggccctggacttcgagcaaaatggtttcgtaactcatgtatcggctccttagagattgcgtgagatgaccatgcgctggatatcgctggtgccttcgtaaatctggcagacccgcacgtcgcggtagatccgctccagtgggaagtcgctcaggtaaccgtaaccgcccagggtttgcaaggcggccgaacagactttctcggccatttccgaagcaaacagcttggccatcgaggcttccaccagggcgggcttgccgctgtcgcgcagtgcggcggcgtaatgcaccatctgccgggcaaccgcgatttgcgtggccatatccgccaggcggaaagcgacggcctggtgctcgatgagtggtttgccgaagctttcgcgttcccttgcgtaatcacgagccgcttcaaaagcggcgcgggccatgcccaccgattgcgaggcgatgcccacgcggccaccttcgaggttggccagggcaatcctatagccttcgccctcctcccccagacggttggcaacaggcacctttacgtcttcaaacaggatctggcaggtatcggaggcatgctggccgagcttgtcttcaacgcgcaacacgctgtagcccggcgaatcagtcggcacgataaacgcgctgatcccgcgcttgcccgccgccgggtcggtcacggcaaacacaattaccacaccggcgttctgcccggaggtgatgaactgtttgcagccgttcagcacgtaatggtcgccttcaaggcgtgcgcgggttttcaggctgctggcatcggagccggcctgcggctcggtcagtgcgaacgcgccgagcatggcgccgctggccaggggcttgaggaactgctctttctgctggtcgttaccgaatgtgagaatcggcacgcaacccaccgagttgtgcacgctcatgatggtcgagcaggcgccatcaccggcggcgatttcttccagcgccatggcgtaggccaggtagccagtgtcgcaaccgccccactgttccggcaccagcatgccgaaaaagcccagctcggccatttcaccgatggcttccttggggaagcggtgctcgcggtcccactcggcggcaaagggtttcaggcgctcctgggcaaattgccgggcggcgtcgctgatttgcagttgttcgtcattgggcagcatggtgattccttaatacaggcattcgacagccatggccgtggcttcaccaccgccgatgcagatggcggcaacgccacgcttgaggcccttctggcgcagggccgagagcaaggtcaccaggatccgcgcaccggaggcaccgatcggatggcccagggcgcaggcaccgccatgcgcattgaccttggcatgggggatctccagcttgctcatggtcaccaggctgaccacggcaaaggcttcgttgatctcgaacagatcgacttcatccaggctccagccggtcttgctcatcagcttgcgaatcgcccccaccggcgctaccgggaacagccccggttcgtcggcgaaagccgcatgcccatggatcaccgccaagggcctgaggccacgtttctgcgcctcggactggcgcatcagcaacaaggccgccgcaccgtcggaaatcgagctggaattggccgccgtcacagtgccgccttcgcggaacgccggtttcaggctggtgatcttgtccagcttggccttgggtggctgttcgtcatgcaggatggttttctgctctttgcccacggtgacctgcaccgggacgatttctgcggcaaagctgccatgggtaatggcttcttgcgcccgggtcagcgaagcgatggcgaacgcatcctgggcctcacgggtaaacccgttatgcagggcgcagtcttcggcaaaggtgcccatcaggcgtcccttgtcgtaggcatcttccaggccgtcaaggaacatgtgatcaagcaccttgccgtggcccatgcggtagccgctgcgcgcacggtcgagcaaatacggcgcgttggacatgctttccatgccaccggcaatcaccacgtcgacgctgccggccagcagtgaatcatgggccaggatcgccgcctccatgcccgagccgcacatcttgttgagtgtggtgcagcgcgtgcccttgtcgagcccggcacccagcgcggcctgacgtgccggcgcctggccgaggcctgcaggcagtacgcagccgaacagcacttcatccacggcatcgggggcaataccggcacgctcgacggcggcgcgaatcgccgcggcgcccagctgaggcgcggtcaggcccttgaggtcaccctggaagccgcccatgggcgtgcgcacggcgctgacgataacgataggatcggtcatggcaaatcctccttacttggccgccatgcgcaaggcaccgtcgagacggatcacctcgccattgagcatgctgttttcaatgatgtgccgcaccagcgcggcgtattcggcgggtttgcccaggcgcggcgggaacggcacaccggcggccagggagtcgcgaacttcaggggtcatgccggccatcatcggggtttcgaagatgccgggggcgatggtcattacacgaatgccaaagcgggccagttcgcgtgcggcaggcagcgtcaggctggcaatggcgcccttggacgcggcatacgccgcctggccgatctgcccgtcaaacgccgccaccgaagcggtattgatgatcacgccgcgttcgccgtcggcattcgcttcggtttcggcgatggcggcggcggccaggcgcagcaggttgaagctgccgatcaggttaacgttgatcacctgggcaaaactcgccagcccatgggggccgttcttgccgaggattttctcgccacgcaccacaccggcgcagttcaccagcccgtgcaaaccgccaaacgccgcaagcgtcgcctgcaccgccgcttcggcagccgcttcctggctgatatcggccacgcagctgcgagcgttgtcgccaagttgcctggccttggccgccacggcgtcggcattcaggtccaccagcatgaccctggcaccggcgccaatcagcatctcggcagtcgccgcgccgaggcccgatgcaccgccgctgaccaggaagctcttgttttcaatctgcattgttgtttccttgaacggtccgaattgtcggaatagtcgccccgcagccgccacgcggcaatggtcaaagccttcaacctgcctgactgttttggccagtcatcgaccgcactgatcatccggtcggcccaagcgattggacgctggcgacgcttgcttctaacctgatggcctgcgccaccaaagaagcccccctgcatgatagtccgccccaaacccaatctccttggcatcctgttctcgctcaagggttcgattgccaagcgtatcgccctgcgcagcctgctggtcacgctgctggcgtcggtgatcgtgctggtggaaaccctgcacccggcgtacttctccaaggtcaatgccacgccgttcaccttgctcgggctgtcgctgtcgatcttcatgagttttcgcaacaacgcctgctatgaccgctggtgggaaggccgcaagcaattgggacagatgatcatcgatgtgcgttcgctgatccgcgaaacccaggtgctcactgacccggctgagcgtgcaggcctgctgcgcagcctgtgcggcttcgcccacggcctggttgcacgcttgcgccatgaggatgaagcctgggccatcaagccgtggggcacgttccaggccaaccaccccaacctccccgatagcctgctacaacagctgggcgcgcggttttcgatgctcgccgagcaaggtgtgatcagcgagtggcgctacacccaatgggaaacccgactggtgagcctcagccaggtgcaggcggcctgcgagcgcatcaagagcacgccgctgcccttcccctacaccctgctgctgcatcgcaccatttacctgttctgcattttactgccgtttgccatggccgagccgctgggctggttgacgccggtgttcacggccattgtcagctacacgttcttcggccttgatgaaatcggcgatgacctggaggacccgttcggtttcgatgaaaacgacctgccctgcaatgccctcctgcgcaccctggaacgcgaagtattggccgccctcggcgaaaccgatctgccgccgcctctggaaccggtggactacgtgctcacctgacgcgggtttgacacccgccgtagtctgaccgaagctggcggctttgctgccctcgctttcggacgcctgcatgtcaaagtcacgccgttattccatcgtcggcctgtgcgccctgctgttgattgtgctgatcacctggtatttctctcgcaccaccccggtagccgtacctgcggccatcgcccatgggtattcaaaagccttgaaacaggcgcgcaacggtgagcccggagcggctcgcgtgctgtatcagcaacttggccggccggatctgtcccccgagcgtcgcgctgcgttgcatgccgaactgccgaactacccaagcccccaggccctgaaactggcagacaaggacctggccagcgaatcaccgctggtacgcgaggccgccatccacagtattgtcggcctggtgccaaccggccaacgcacgctgctgctcggcccagtgctggatgaccccgagcaggatgtgcggtttgccgccgccaacgccttgcttggcctttcgcccgacaccctgggcctgtacttcgggccgttgcagcaggtactggatgaattcgtgaaaaagctcaaggcccaacccgaaacggccgaaggctggattcaactggcgcgcctgtatatccacagcgccctgttgccggaggcgcaaaacgcgcttgagcaggccatgcgcctgcaaccggataacttgcaagccgtggtcgcgcagatcgagttgctggacaaacaagccaagaccgaggagtcgcgccaactgttggcacgccaattggccgcgcatccggagtcagcctacctgcagcatgcgctgggcatgtggctgctgcatcatggcgaacgtccgtacgccctgctcggcctgtccaaggccgtggagctggagccggacaatcaggattaccgctacgacctcgcgaccacgctgcatgcgcaagaggaactggaggctgcgcaacgccagttggaagaaatcatccaacgccacccggccaatcgcaaagcccgggttttgctggtcaattactggaaagagagcggccaactgcagaacgtccaggtactgctcgcgcagcttgagcaacagaatccggacgaccctgcattgcagcaaggcctgtaggccgactcagaatttgttgaaccgccacaaagcgctacggtcaagagaatatggcacgtccacatgggcgtgcatcctctactcgtatgtgacctgagggcacttcttgtctacatccaaagcgcagttatccgaaaaagcggccatcggcattgaaggtcttgatgacattcttgccggagggctctcgcgcagccacctgttcctgctggaaggtgagcccggcacgggtaaaaccacggtcgccctgcatttcctgcaggctggcgcccgcagcggcgagcgatcgctgtacatcaccctgtcggaaaccgaacgcgaattgcggcaaggcgccaagtcccacggttgggacctggatgacaacattcatatcttcgaactcacaccaccggagagcctgctcaacgctgaccaccagcagagcctgctgtactcctccgacctcgaactgggcgaagcgacccgacaaatcttcgaagtggtggaacgggtcaagccgacccgggtagtgatcgacagcctctcggaaatccgcctgcttgcgcaaagctccctgcgttatcgccggcagatcctggcgatcaaacactattttgtgcgctacgacgctactgtcctgttgctggacgacctgaccaccgagtccctcgacaagaccgtgcacagtgttgcccatggtgttatccgcctcgaagaactgacccccaactacggcgccgaacgccggcgtgtacgggtggtgaagtaccgcggccagaaataccgtggtggcttccacgacttcaccatcatgcaggacggcgtccatgtgttcccacgcctggtggcggctgagcatcgtggcggttacaagcgcgagaccctgagcagtggtatcaaggcattggatgccctcatgggcggcggcgtcgagaccggctccagcagcctgatcctcggcccggccggtaccggcaaatcgctgatctcgatgattttcgccgccgccgccgtggcgcggggcgagaaagccgcgctgtttatcttcgatgaagagctgggtctgttgttcgaacgcatgaagaacatgggtatcgacctggcggccctgcaggcaaccggtaacttgctgatcgaacaggtcgatgctgccgagttgtcgccgggcgagttttcgcaccgtgtaagacgctgcgtggatgagcgcgggatcaagaccgtggtcattgacagcatcaacggctaccaggctgccatgcctgaagagaacgcgctgatcctgcacatgcacgaattgctgctgtacctcaaccgcaggggcgcggccacgttcatgaccgtcgcgcaacacgggctggtcggcgacatgcaggcccccgtcgacatcacttacctggcggataccgtgatcctgctgcgttacttcgaggcattgggcaaggtgcgccgggcgatttcaatcatcaagaaacgcaccggctcccatgaggccactattcgcgaataccggatcggcagccagggcatgaccgtcggcgaaccgctggataacttccagggcgtactgcgcggcatcccgacctacatgggcgccggctcgcccctactcaaggatgaggacgcgtgacgggcctctctccagtctccgagcgagcaattgtattggcgccgatggggcgtgacggctcattggcgctgatgatgcttaacgaagccggctacagcggtatcgtcgccagcaacctgggggcgttgtgcgaggcgctggaagacggtgcagggctgctgatcattgccgcggaggccctgcgcggggtggacctggaaccactgttggagtacctgcatcaacagccggcatggtcggatctacccatcgtactaatgacccatcatggcggcagcgagcagaatggctcatcccacctgagcggcatgctcggcaacgtgaccttcctggagcggccgttccatccggtgaccctgatcagcctggtcagcgccgccctgcgcggccgccgccggcaatacgaagctcgcgaccgcttgatcgacctcagcgaaagtgaactgcgcctgcaacgcacgctggagacccttgaacagcaagtcgaggaacgtaccgcccaactgcgcagcaatgaagaggcactgcgccaatcacaaaaaatggaagcggtcggccaattgaccggcggtatcgcccatgacttcaacaatatgctcaccggcatcatcggcagcctggagctgctgcgcaggcgcgtggcccgtggcaagttggacgatctcgacagcctgatcgacctcggggtgacctcggccaaccgtgccgccggccttacccaccgcctgctggctttttcccgccgccaatccctcgattccaaacccgtggagatcaaccgactggtgacctcgatgggcgaactgctgcaacgcagcatcaacgaaagcatccacctggacatgcgcctcgcggacgccctatggacggccgaggccgatcccaaccaattggaaagcgccctgctcaacctggtcatcaatgcccgcgacgccatgcccggtggcggcagcctgtccgtggagaccaccaaccgccacctcgacagcgtgttcaccgctgcctacggcaccttgaaacccggtgactacgttgagttgagtgtcagcgacaccggctgtggcatcccggaaagtgtgatgggccgcgtgttcgacccgtttttcaccaccaagcccatcggccagggtaccggtcttggactctcgatgatctatggctttgcccgccagtcccatggacatgtgaccatccacagtgaagtgggaaaaggcaccaccgtgagcttgttcctgccacgcttcttgggtgaaatgggcactgccaagccccctgaccccgcgatgccgccgttcgccattgcaggggaaacggtattgatcgtcgaggacgacccagcggtgcgcatattggtcagcgcggtgctcaaggaactggggtatgcctttgtcgaagcgggcgatgccgatacagccgtgcctatcattgaatcagaccagcgtatcgacctgatgatcagcgatgtcggcctgcccggcatgaacggccgccaattggcggaaatcggccggcagatccgccccgcgttgaaagtgttgttcattaccggctacgccgaacatgcggcggtgcgcggtgggttcctcgacccggggatgcaattgatcaccaagccatttacgtttgatttattgaccaccaaggtcaaggagatgattcaggcctagacaggtccatctgatgcacaagaaacaggcagtcgtaacagggtctacaaaagagatcccctggaaacaatgcgacattcataagtaagaaaactttggaacgaagtggggtgtttttctcacgcagtgctggcgcaaagcgtacgaataaacacccgatcactagttttcacggatctttcttatgactgttacttcttatctgccccgatctccccatcctgtctacccgccggtaacgcagagtgcatcgccaattgccatgagccaggccccgacagccgctgccacgccacttgctggcgaaacaccccaggccaaaggcgatggggagttaaaaaatgagattatcaaatcgttaattcaatatcagtcgtcctctactcccaaacccgttcagagcatagatgtaaccaacatcccatcgcgctcttcctacgggcaacagctagcactgcacgacggtatcgttaatagcaaggccttcaaacagtggaagatcgataaccaactggatcaggcagacacgttaaccattgacacccaaaaagggaccatcactggcatcacttacggtaagaattatcaggtcaaaaccgttgaccttcacaccttcgccgggtggcctttgctcctgtccgctaccaaggcactgatgcccgaagaaggccgtttgacgctaagtggcgcaggtgatgcaaaaacaacaacggccactaagttgcataacatagcgcgcttttatggcatagagttcccctctttggaggaatatctaaaagaaggcccgggcgctcagctgaaggcagtcagactcctgacctcaaaactctcaacggaaactatcacacccgccaatgcctccgatccctttaaggaagacttgagtcaccaaaagacccagctagcggacctgaacaaccgttttcgaatgagtacggcgttggcttccctgcctcacactactcgccggtcctcggcaaacgatatatacgaagatatggtcgcaagcagagtctacgtagaacctgaatcgtcctatgctcccaaggtcaaccagccgtacaccccgcaagtggacctggtctcgttgatggaaggttatggcataacccctcccaaatcgtatgaagaggtagacacattaacgaaagcactgcaaagcccacccctgagaacgcccgctcatggcaatttggcaggtgcgctgacgcacttgagcattgaagatcagcgcgtgtttcaccaggtcatcaaggaggccctgagccccgaggaagaaacgtccttactggaccagttgacccgtggtattgaatgggatgagaaggcgttcagcgacagtcctcgtctcgccatcgatgcaatgcttaagtcacctttcgctcaaaagttagcaaaagcggctgaagagcgtctgggtaaacttgcctcgcccgacgctatcagcgactgggctttggaagcgattcacacggtgctgggtccgcatgaagatttggaaaaatatacgaccccgaaaaccctcggacttgcaacgttcattatgtcctcgcgcaagtccccggaaagcctggtcaagaataaacctgagttcttgaccaagggcactcattccggggtcagctttgccaccgcatttgcacgtaccgaagcccaggctcccggagctacaagcaacatgacgtatgccgagatcatgaagcgcgctgatctcccccccgtcacactcgcagaccgaatgattgagcaacaggcccaaaacactgccttgaaagactggggtgtgattaacggtgtcctcgtggcgaatgatcagggcgaatataccgagtcgcaaatggaacaggtgcgcgatagtttcagtcaacaagtctccgagttgaacgccgcttctgagacgttttcaaaagaaatccccgaccttcataaacgggccgtggacgcaataaaaaaatggaacccacacttgacggaggagcaaatcctgagcaagtcgctggatgcaaccgaccccgaattactggcctttccaggaccgtattcgcttgtggacgtgttccttcagaagactgatcgttacgatacatacaggagggacaagtttacctcccgcgaaccaagcattgatctcgatacagttgtcatccatgccgatcaggcatccgtcatgaaaggcagctttaacacagatattaaatcctacagtgaagagcatgagtcagcgacacgcgcacagactaaatatttgatttcaaatttaagcctggacgaccggcgcattattgaaaatggaaaaataacagtctcaagagaagtccaggtcagcacgaacaattttggcgccagcaatgtaaagcgtgtgtcacacagcagcgtgatcgtgcgcagcgaagttcaggaagaaggtcgcactcgcgtctactcctatgaaatcgacggggccaccaataccgtccgaaaacgtgatgatttgaaggatattacacctggatcgctacctggcgagttccctaccggcctcacgtcgacttacttggagtccatcattcctgatggcgactatacaacgggtttgctcgaccagcatccgtctggcgcttccgacggtgtacccaatagctactttagcgaacggtcgaagtacatcgcggacgccatggtaaaaagtgtcgatataaagggttatgaggactatttgagagggcaaacaacgtttgatactgaagttcccttttatcagaagatcgttgattttttaaaaggacttattccgggttacaacgccgttgaaaacttcgttgccggcaagtggcaggaaggccttgtcgacctggcatgggatgcattcggctttctgctcgccggggcgacggcgacggtaaaagcgggtgcattcgcagctggcggtgcttccaatacattgctcaaagggggtaagaaactggcgcgtggcgctataggcgcgctcaaccccttggatccgcaaggcttgggtttggccggtgtacaagaagtcataaaaacagtgcaaaggccaggtgtcgcgggcagcaagagcttgcccttcagtggcttcaaatttgacgtcgcgaacactttcaagaacgtttcccacgccacgataggaactgccgatcgtggaggtgaaaaacaagaggtcgcggcgactcagtggaatggcaactggtatgccctcgaccccgtcacctataaaccgtatggtcttcccctgaaggatttcgcagccagttcatgatgaactccgccaaggttgttcactgctcccggggacaaccttggcggtcaatgcacggaccgagcacatacgcattgactactttcatcacgccagtaaccgttggatatgctcctgcagtgtatccagatcaaacggcttggccaggatcggcgcattgcgcgtgatcgggctgttgcagtcgaggatctcctgcgggtaaccgctgataaagatcactttcagctccgggcgcaacagcagcgcaggctcggcgatctgcacaccagagatccctcccggcaagcggtaatcggtgaccatcaggtccaggtgcggcttggtggcgaggatttcgaaggcctgctccccgtcgatcgccttcaacacccgatagcccaggccggccaggtattcacccagcacaaacataatggattcgtcgtcctcgacgatcagaacgacatcttgtgcatcttcactcatgggaagcctttgtccggtcaatagctgcaattacgaccatggggtcacgcagaggttgcgtcgaggtgacgattgagttcatgccgtcgcttgcagcggcaggcacaccctgaacaaggcgccctcgcctatccggctctcgacttcgatggtgccgccatgggccgcaacgatctgttcggaaataaacagccccaggcccaggcccgctgcgacctggctggcggacactcgctcgaattgctggaaaatacgcttctggttgtcttcgctgatcccgattccgtgatcgcgcacctctacgcgggcttcgtcatgctcgctgtacacgcgcacttccaccgggctcttggccccgtagcgcagggcattggtcaacaggttggtgaccacttgctcgatacggaactcatcccagtgcccctctaccgggccgtcggcaaccagcgtcatggatgaatccgccgccgcgacctggggcgcgaagttctgcaccaggctgctgacaagctgtgtcaggtcaaaacgtgccggacggatcgacagtttgccggtacgaatgcgtgacacgtcgagcatgtcttcaatcaggcggatcaggctctggatctgtcgctcgtcccggtcgaccatggcgtgcatcttctccagggtgaacgcggcggcgttgtcccgggccaggtgcatcttgcgcaactgagtttcgaggatcagcccattgagcggcgtacgcacttcgtgggcgacgatagacatgaagtcgtcacgcatacgtacggcctgttccagctcagcctgggtggcctgcaggcgcgtcagcagcagttcctgctcgcgccggctgcgttccaaggcttcgacctgcagcttcatggccttgctttggcggtacaggtcgacgaacacgttgaccttgctcttcaccgcatggatatccaggggtttgtgcaggaagtccacggcgccgctttcgtagcccttgaaggcataattgagttcgcggccggcggcgctgacgaacacaatcgggatgttcttggttttctcggtaccgcgcatcagttcggccagttcgaacccgttcatcccgggcatctgcacgtcgagaatcgccatggcgaactcgtgttccagcaacagggacaaggcctcgtcggcgctcaatgccttgaatacctggcggtcctcgcgcttgatcagcgcttcaagggccagcaggttttccggcagatcgtcgacgatcagcagtttggcctggacagtacttaacatggggaatattccagcgaagccagcagtgagccaatgcggctcaacgtcagaatgtgatcgggtgtgtgcagtgccagggccgcacggggcatgacggcgacacgtgcttcagtgggctcttgcaccacagtggttccgccctgctgcttgacgtgggccaggccacgggcgccgtcctggttggcgccggtcaagaggatggcgagcaagcccgtgccgtaggcatcggcggcggattgaaacaggaagtcgattgccggtcgcgaatggtgcacgcggtcctcctgactcagggacaggctgcgatcatgctccaccgacaggtgataaccaggcccggcgaaatacagcgtgcctggcttgagcacttccttgtcgcgcgcctccaccaccggcatggcaacgcggcgatcaaacacctcggccaactggctgcggcgctcgtcgggcaggtgcagcacggtgatgattggcaggccgaagtctgcaggcaattgggcaaataccgtcagcaacgcctctacgccaccggcggaggcgccgatgacaatagcctctatgccccggacctgtgccgggctggcagcctcttgattcatagctttcggtagatccgttcctgtttgaccagcggttcgaattgcttgccatacgcggagaagtccagggtctccttgctgcccagcaccaggaaaccgcgatgacacagcgactcatggaacaatccaaacgctcgatcttgcaattttttattgaaataaatcagtacgttacggcacgaaattaattgagtttctgagaatacactatcggttgccaggctgtgatcggcgaaggtcacattctcacgcagcgttttatcgaagatcgcgtaatcgtaagccgcagtgtagtagtcggcaaatgaacgttgcccaccggcctgctgatagttggctgtataagcgcgtacgttctccagcgagaagatcccctgctttgccttgtccagcgacgccggattgatatcggtggcgtagatgatcgtacgctccagcaacccctcttcccgcagcaggatggccatggagtagacctcctcgccggtgctgcagccggcgatccagatcttgatcgacgggtaggtcttgagcagcggcaccacttcctggcggatcgcgaggaagtgcgacgggtcgcgaaacatctcgctgaccgggatcgtcaggaactgcagcaactgcatgaacgccgccgggtcgtgcaacacgcgctcctgcaaggcggaaatggtcgcgcaatcaaactgacgcaaggcatgcgccacgcggcgcttgaccgacgccccggagtaatcccggaagtcatagctgtacttgaggtaaatcgcctcgatcaacaggcgcagctcaatatcgctgcttttttccaagaaacttcgctccacttaaatgcgttccatcttcggtagccacacgcggatcagtgagaacaggcgatccaggtcgatcggcttggccaggtagtcgttggaaccggccgcgaggcagcgctcctgatcgtctttcatggccttggccgtcaccgcgatgatcggcagctttttccagcgcgggtcctggcgaatcaaggcagtggcctcgtaaccgtccatttccggcatcatcacgtccatcagcaccaggtcgatatcctcgacttcattgagtttgtcgatggcctcacggccgttacgcccgatgaccactaccgcgcctttgtgctccagggcgctggtcagggcgaagatattgcgcacatcgtcgtccaccagcaggatcttgcgcccctcaaagaccttgtcgcggctgcgggcggtcttgagcatcttctggcgatcatgggacagctgggattcgactttgtgcagaaagagtgtgacctcatccagcaggcgctccggcgagcgggcgcccttgatgatgatcgagcgcgaatacttgcgcagttcggcttcttcatcgcgggtcaggttgcgcccggtgtagacgatcaccggcgggaacgagcagatgtcctcggtggccatgcgcttgagcaactcgttgccgagcatgtccggcagcttgaggtcgatgatcatgcagtcatagacattagtgcgcagcaggtccagggcggcctgagcatagccaacgtcggtgatctcaatgtcatcgtcgccgatcaggcgggcaatgctgtcgcgttgcaggtcatcgtcctccaccagcagcacacgcttgaccttctgggtcagcttggcttccaggcgcgcgaacacgtccttgagctcttcgcgggtggtgggtttgaccgcatagccgatcgcgcccatgtgcatggcggcttccacgcggtcttccacggaaatcacatgcaccgggatgtgccgggtattggcgtgttccttgagacgttgcagcacggtcaacccggaatggtccggcaggcgcatgtccagcaggatggcatcggggacatattcctctgccaggctgtagccttcgtccgcgccgtgggctaccaggcagtggtagcccaattcgtgggccaggtcgaagaggatacgcgcaaagttaggctcatcttccaccaccaggatgcaacgcgtggtaaacggggccttgtcgcggtcatcggcgaagcgcgggatcaggctggcatcggccaccggcagcggcgacaccttggccggagccggtgcgggtgccaccaccacttggcgcggctgctcgatcggtgccacgtcttcccccggctctgcataatgttccggcagtaccagcgtaaaggtgctgcctttgcctggggcactggtcacgctgatatagccacccagcagggccgccaggtcacgggaaatcgacaggcccaggccggtgccgccgtagcggcgattggtggtgccgtcggcctggcggaacgcttcgaagatgctttcctgctggtccggcgcaatgccgatgccggagtcgcgcacggtaaaggcaatcccctcctcagatgcacgcgacaccgacaggctgacctcgccctgttcggtgaacttgaccgcgttggacagcaggttcttgaggatctgctccaggcgctggcggtcggtatacagcatagtcggcgtgccttcctgcacctcgacctggaagccgagcttgcgatcagccgccagcggctcgaacatgccgcgcaggccgtcgacaagccgtgccacgctggagttttccgggcgcatctccagcttgccggcctccaccttggagatatccaggatgtcgttgatcaagttgagcaggtcgttgccggcggaatagatcgattcggcaaacttgacctgttcggcgctgaggttttcctgggggttctcggccagcaacttggccaggatcaacgagctgttcagcggcgtgcgcaactcgtgggacatgttggcgaggaattcagatttgtatttgctggagcgctgcaattcttcggcgcgttcctccagttccagctgggcctggttgagctcgatgttcttgcggtccatggcgtcgcgttgttcggccagggtctcggtctgttcggccagttgctcgttggtctgctccagttcggcctgctgggtttccaggtgggcctgggactccttgaggatgcgcgactgttcttccagctcttcgttggcggtcttgagttcttcctgctgcacttgcagctcttcgttgagctgctgggtctcggccagcacttcctgcaggcgctggcggtaacgcgcggcttcgatggaagtgccgatattgccggcaatcagctccaacagctcttcatcgcgctcttccagcgggcgcaggaagcccagttcgaccacgccattgacccgatcatcatcgctggtgggcatgaccagtacgctgcgcgtcgacccttcgcccaggccggaactgaccttgaagtagtccaccggcacatcatccaggcgaatcaggcgatccagctgggccgcctggccgacgatgccttcgtcgctgtagatcgcttgttcccgctgttcctgttcgcgggagaaaccataggtggccacgcgcttgagaccgccgtgttcttcacgcacatacagcgccgcaacggcggagcccatgtactgggcaaagaactgcaggatattgcgcccgagcatattcagggtcagttggccgagcacctgttcggccagttcggtctggccgtttcgcaaccaggcttgttgctcaaggcgtcgcgcaatcttctgttgtgacgcgaggtttgaactgtaactatttgataatgaaacaagatttttacgaccgatgtaggccagaaagccactcaatcccaatacaaatgccaagtacagggtgacgctgatcaccgtggtgcgggtgacgtcttcattgcgggtgatgcgaaactgctgctccatcgccaccgcgtcgtcgtattccttgcggatttcatcggtcaggcgcttgccgcggccggccttgactgcgccgcggtagtcaccactgttgcgctgcatatcaatcatcgactgggcgtagttgttccactcggcctgcagggcttccaggcgcttgaggcgatccacctgctgtgggttgtccgccaccagctcctgcaggttacgcaggtcggcgatgatgcgcggcttggccacttcatacgggtcgaggaaatgctcgtcgccggtgatcaggaagccacgcatgccggtttccaggtccacggtcagcttggacgattcattgaggttattgataacccggtcggtgtgttcaacccattggatcaccgacaacaggtaagtgatcaggcacacgaaaaacaccgcgctgagcacgcccacacccaggggcaatgcaacatttcggctcagcagattacgaaagctcttttcatcgacggacgaagcgggagtcatgggcatgccttggccaagtgcagaaaacccaggagtttgccccaaacttggggttgaacgctatttttatgccaaatactgtcaggtgactcactgccgattgtgagaccccacgtcaaatcaagccactgttttggctgcttacattagtgaacgcggaggcacaggaacgcaggtcgcagggcattgcactcaatgatgcgccttgaaaaaggcagccttgcgcaagcaaatgcgcggataacgtccaacttcaaagggtatccagccatgaccagtctctacgcggtgtccacatcagccctcaacccacccacgcatgcggccaatcaactctatcgactgtcccaacccacctcgtccgaaagcgtcgcagaacaacaggccaacccggcgccacaaccgacttctctcacaacagccgacctctccaacaaaaccctgattggtaatgcccgcaacctgcataccctgtcgcaagcgctgcacaaaattgccaggacactgggacacaacgcgtctcccccggcggtgctgaacgcactcaagaccaccgcaatggacatccacccgcattcatcctttccaacgcagcctgacacccttgtcacactggagagcttcatccgcggcattggcctgggtctacccaccaaccatttttccttgaccgcgttagcggatgccgtcagtgagagagcggtggcgaacccgtttgggaacttcgggggggcactgtcctggcctgtacctttgagtactgacgatcagcgaacgctgcaggcagcggctctccaatacatcaaggatcacgcggaatcaccggagacgggccacagcctgggaatccttgagttgctcaatgacaacaaacccttgacggatgaggccaaggcagaccccatcaaagcgttggagtcgatcctgaacagcccccgagggcaggcgtttggtcgggcaatgcaagcgcatatgaagggtatcgacaccgccaccagcgcccatgactacgccctgccggcgatctacctggccctgaaccccgaagctattaccaacccgcagcgaaaaagggttgaaccgcacctttggggcgctagcccgtcagcggtggtcgatgcgcaggtcaaacccctgatagacgatggccgggttagcccggagatggccgacgttgccgcaacgataatattcggactgacagcgcctgcgtttaaggtaaaaggccttcccgacaatatcacttatggcagcccggcctcggcccgcctgcagatcgcagtggatatccaggaagcgctgtcacccgggtcggcgatgaccatgggcttcgacgaaatcatgatcaaggccgaaaaggccgcccaggtcgatccagcggtaaccgagttcgctcagaaaaccgcactggtcgattggggggttgtcaacggcctgatcgagagaaaggatgacaaacactacacggacctggaactggatgagctgagaacccaatacaaccgcgagttcgcagagcagatcgacgcacagacgttagccaatgctgaaatacccagccgtaaggacatcgccctcgccaaactgaaagaacgttttggtgaaggaattccgtttgaaaaacccctgttgaaactccagacatccggccatcaatcccccgcaatgccgatctacaatccaaacttgcggcctgaagggtatttttcgatgctcgacatcgcgatgatggaaaaccgtggttacacctggacgaccgctgacccgcgtatccccctcgccgcgatcaacgaaaatcctgttctcggtgtgaatgcagcattcaagcaacaattcgacgaggctattgtttcgcgaaagaaaggtctgagtgcgaccgtcaggcacctcatatccaaactccccttggatcaacgcaaagacttggaatatggaaagctgcgcttctttcatgattcggcgtacagaataaatttcatagacaaaacactgctacacaaatacctcaccttttcgataaaaaccgagcgtgacggcgtgtcgtctgtttatgaggtcgacatcaagaaaggcaccatcaccaagcaacgcagcggcaaaaattacgatgagagcacctatggcccaggctcacggcaaattcatacaaccgagttccggccgtcccgctatagccaggcaaaccagaaggaaaacacgggcgacagcgcagtcacgccaaaaagcttcagcagcgaccgcagccaatacattgccgatgcgttcgttgagcacctggatatcgataacgccgatgttgtgaaagcggccaaaggctctacgcagttggacaaacagttcgaagcacaggatcgcgcggccaactttttcctggacctgatcccgttcagatcggccattgtcaacttcataaacggcaactatgtggcgggcgctcttgatctgacgatggatgtcatggggttcctgaccgctggcgcagcgactgcggccaagctggtcaaggtgggggcgatcgccggctctgctgccacaaagctggccaagggcgcgcgcgttattggagcggcgaccctcagtgcattcaacccgctggggggcgcagacgacctggtatttggcggcgcaaggctactgggcaaaagccctcgggcactggagaaaggcatacaaatgctacgtggcacatcagacagttatgggctgctgaaaaacctcagccagcagtacgacatagccgcaataggcagctacaaggtcggcgaaacaaagatccagacggctgccgtattcaacgatggacaatggtaccgctacgacccgatcaaggctcaaccctacggagccccgctggagaacttcacgccctctgtcgcggcctccgcgggggaaatcaaagggttgactgagtcgaggagcatcgagtggttcaccagttggtggagttcctcccgtcccgacgccaaccccaatttcgcaaaggaattcgaggacttgcggttaagcgccttgaaaacggacgccgaaggattcaaccatggttataacagccagacaccgccgtcgattaccgggtactcaacatccctgagcgttgaacagctcaagacactttcactgcaagccggtccaagtgcgcaacagttgggaagcctgattcgccgtatcgaagacttggaagaactgccgaatacgttctataccaaaatggaaaacctcaaaacgctggatgcggacagtttcaagcagggttacaagtacggaacgcccgactcgataaaggggtacaaggaggggttgagagtccctgaactccaggagctggctttgcaacgtggattgacgacgcaacaaatgggctgtctgtaccgacaggttgaaaagcgtgcgatcacgctcaacctgtccctggccaaaaaattcggcgataacatcaaggccgcgggcggagcgttcgtcccgatgccacaaggtttgtacctcagccaagtcagtcctatctcgggagggcagtgcgcggtgtttgctaactcgatggcctatgccattcaggagggcaagcaaaccacgctgttggagaatcttttcacggtaatggctcatcccgagcatcccgccacccagacatttcaaaagactatgcaaagtttccaggccaagctcaggcatgactttcatgtaggccaatacaaacagcagcggacggctgcgcaaatcatcgagcaactggcgaatgccaacacgtcgacccgcctgatgataggtaatacaacacacggtattaccgcaggcgttgtcgtaaagggcggcgaaaaagaatggttctacttcgatcccaacttcgggttggcaacattcaagtccgaggcgtctatgcgcgccggtgtggaaagtgcaatgagcaccggttcaacgagcgcattattccgtccgaatccggggaccttgacctattctgtctcggacttcagtgaattgaacctgatgaacaccgtcggcagcatcaacggcgtgcatgacctagtggccatcccgctatcaatttcctcccccagattggcctcaagtgtcgcctgacgtttgacggggagtaccggcatcatccgattcctggagatgccgcagtcccttgcgagcccggtagaaacccgaccacagactcatacgggacattccttcccaacaccggcacaataccgacctcggtgagggaacttgccgagatcgccgcgactcattagaggatggcctttccaccgctcacggccaatcctttcactctcgggaatttatttatgtccgccaccgcctccaccatccttgtcgtcgaagacgatgccatcgtgcgcatgcttatcgtcgacgtcctggaggagttggaattcaacgtgctggaggccggcgctgctgaagaagcgctggcactggtgcaaaacactggccaagtgatcgacctgatgatgaccgatgtcggcttgccggacatggacggcaagcaactggctgccaaggtccgcgaactgcgtgcggacctgccgattctgttcgccagcggttatgcggaaaacattgacgtgccagccggcatgcaagtgatcgccaagccgttctcgatcgatcaattacgcgacaaagtcaaatcgatgctgcccgcactttaatttcgacctgtacacggtgccgcctgcatgggcggcatttttgcgtcaggtgttcagagattaacgtgaccttcggtcaataacatcggaaactcaacgctattcagacgctaccctacaaaacgcactcaggaaggacgcaacaacatgattggaaaaccgacgcgcctgctgttggcgagcctctcgatactcatgagtaccggcgcctgggccgacttcacggcaactccggccgaagcccgggccattgccaaggaagcctacctgtatgggtttccggtggtggacatgtacaagacgctctatacccaggccgttgacaaaggcggtgccaacttcaaggcgccgttcaaccagatcggcaataccgcgcaagtgttcacgcccaaggacacggccttcgtcacgcccaacgccgacacgccctactcgttcgtctggatggacctgcgccgcgaaccgctggtgctgaccctgccctggatcgaagacgaccgctactactcggtgcagttgatcgacctttatacgcagaacttcgcttacctgggcacccgcagcactggtaacaacggcggccactacatgatcgccggccccgactggaagggtcagcagccggtgaatgtcgaccgcgtgatctacagcgaaagcaatattgcctacgccctgtaccgcacgcagttgtttgatgaaaaggacctgggcaaggtcaagcagatccaggccggctataaagtgcagccactgagcagctacgtgaaacaacccgcgccagccaaggcggccaaggtcgaatggccaaagcccacggcgaccatgaccgaaggcccgcaattgtttcgctacctgaacttcatgctggccttcgccgcgccgcaggacagcgaaaaagagctgctggcccgctttgccaagatcggtatcgccccgggcgcgccgttcaaggtcaaggagctgaccaccgaacagcgcaaggccctggatgaaggcattgccgacgcccatgccgaatttgccgcgttcaagaaagacaaagtcgacactcaccagatcaccagcggtgatctgttcggcagccgcgaccacctgaacaacaattacctgtaccgctatgccggcgccaacatgggcattttcggtaactcctccgacgaagccacctacatgagctacttcgtcgacagcgaaggcaaacccgccaacggcgcacgccacagctacaccgtgcattttgccaaggaccaactgccgccggccgatgcgttctggtcgctgaccatgtacgacgccaagaccaagcttttggtgcccaaccacaagaagcgctacctgatcaattcgcggatgctgcccaacctcaagcgtgacgccgatggcggcctgacattggccttgcagcaccacgagccaccgaaggccgagcaaagcaactggttgccggcgccaccgggtccgttctacgcggtattgcgcatttacctgcccaagcctgaggtgggtaacggccaatggaagctgccgccgttgacgccgctcaagtaacgccacgcgcccggtcgcaacaatggtgagggcactgcagccctcacctctcgcaagttctagcgcgtaagtttcacgtacgactgatgcaggtccgacgcccagccatcaatcacgcttttcacgtcaccggccttcatcacctgcgaatcgttggacagcggcttgcctgtgcctttgcgcaccacctgggcgagcaccttgccattggcgccatcgaggaactgcgcctcggtgcccagggtggtttcctgatcacggatcccggtgccggtgcttaccgccgccacgacgaaggccaccggaatatactcatagggtttgaggccttcggtcttgctgctcacggcggtgattgctgcacgcaccacgatcacgcctggacctggcgcattggccaggggcagggatttttccagctcacgcttgagtgcctggttgtagtaggtgttgatgccgttgagggtggttagcggaattttcgcggtggcctggggcttagggtagaactgggtcggttcgacgtacaccgcgtgatagcggctcagatccagctcgggatcgacccagcgcatcacctcggcccccgatggagacttggcttccttgagccggctgtagtccgagagaaagccggaatactcatccggcgcggtgatcttgctggcacaccccgccagcccgagcgaagcgatgcacaacgtgcagagcaaatgcctaagtgtcatgtttgaactccctggcggtcgacgttggaacactgagttgtaggtatagccaatcctggcaaaataaccctgttcccatcattcgacgtttcagctgcgttcgcgggggatcaggctttgcaactgcgaggccaggaagttggcgtcgaaaccaaaggtgtccgggtctttgaggccattggtcttcttccacaaccagtcgttcttatccacgggtaataccaacgacacactgccgtgacgtgccgcggtcaggcccatgaccgacacagagatcaagccacccgcgcccatgacatccggcacgaactccaccggtttgccagtgatctgtacggtcagtttctcggtcttgaatgtcgaggtctccaccggcacgctcgggccgctggctacgtaagcttcacggtggacttcaagcaaccccactgtcttcaccggctcaagccactgctcgatctgcccgaacagctcatcgagcttctgcgcccaacgggccgactgcacgtcgaactgctgcttcttgtgcgcttcgctgtcggcgtaatgacgaagcatctcgcccagttgctgtacatcgtccattgcggagttccttgggtgagcctggttgcgaagcctgatcatggcagatgcagccattcgacgtacggcttaaaactgatccgcaacaatgaggtttttctgagcctgttttgttttacccatgcttcctacagtgccgccacttggaaccgtgggaggactgagcatgagcagcacaacaatcggacaggcgtataactataaagtcgtccgccaattcgttatcgccacgatcgcctggggcgtggtgggcatggccatgggcgtgtggattgcctcgcaactggtctggcccgagatgaatctcgatctaccctggaccacttttggtcggttacgccccctgcacaccagcctggtgattttcggttttgccggcagcgcgcagtttgccgccagctattacgcggtacagcgtacttgccaggtgcggctgttttccaaccgcctcgcggcgtttaccttttggggttggcagtcggtgatcgtgatcatgctggtcagcttgccgctgggttacaccaccaccaaggagtacgccgagatcgaattctccggcgcggtgtggatggcagtggtctgggtggcgtacgccattgtgtttttcaccaccgtggtgcggcgcaaaacccggcacatctacgtgggcaactggttcttcggcgcgtttattctggtgattgccatgctgcatgtggtcaaccacctggcgatcccggtggactggttcaagtcctacccggtgtattccggggcgaccgatgccatggtgcagtggtggtatgggcataacgccgtggggtttttcctgactaccggtttcctgggcatgatgtattacttcgtgccgaaacaggtcggacgcccggtgtactcctatcgtttatccatcgtgcacttctgggcgctgatcaccctgtacatctgggccggtccgcaccatttgcactacaccgccctgcccgactgggcgcagtcactgggcatggccatgtcgctgatcctgctggcgccgagttggggtgggatgatcaacggcatgatgaccttgtccggcgcctggcatcagttgcgcaccgacccgatcctgcgattcctggtgctgtccctggcgttctacggcatgtcgacgttcgaggggccgatgatggcgatcaagaccgtcaacgccctctcccactacaccgactggaccatcggccacgtacacgccggagccctgggctgggtggcgatgatcaccttcggtgcgctgtatcacatgattcccaaggtgttcggccgcgagcagatgcacagcgtggggctgatcaacctgcacttctggctggccaccattggcaccgtgctctacatcgcgtcaatgtgggtcaacggcattacccagggcttgatgtggcgcgcggtcaacgatgacggcaccctcacctattcgtttgtcgaggccttgcaggccagccacccggggtttgtggtgcggtttgccggtggtgtgttctttctgaccggtatgctgctgatggcctacaacacctggcgcacggtgcgtgtcgcggacctgaaagtggcgcagcttgatgcgcggatcgcctgagatgtggggcctgctgatggtggtatgcctgtatggcgcggtggagtattgcttgcgcggtcaatcggacaaaagcctggacgacgccagcctgatgcccttcgccgatgacccggaagtggcacggcgagtggagttggcgaccggcaagcaggtgaacgcagtggcaccggaagaggccaaacccgggtggaccaacctggacatgtgaaactgcaccggtcatttcgtgggcaactgcgtatgactaatcaatggtcgatgggtaaggtgaagcgactttccttgtcaggagcatcgcatgcgcaccatcggccttatcggcggcatgagctgggagtccagcgccgagtactatcgcatcatcaaccaacgcgtacgcgaccagctcggcccgctgcgctcggcgcaactgttgatgtacagcgtggacttcggcccggtggaacaggcgcaacatgccgggcgctgggatgacaccgcactgatcctcgaagacgccgcgcgccgtttgcaagccggtggcgccgactgtgtggtgctgtgtaccaacaccatgcatttggtggcgccgcgtatcgaggcggcggtgtcgattccgttcctgcatatcgccgacgcggcgggtgcggctgccgtggaaggcggtacgctgacggttggtctgctcggcaccgcgtttaccatggagcaggatttcctcaagtcgcgcctggccgcccaaggcctgaccgtgctggtgccggaggccgacgagcgtcaggccgtgcacaggatcatctatgaggagttgtgcgtcggcgtgatcagcgaagcgtcacgcaaggtctaccaaggtgtgatcaagtccctggccgcacgcggcgcccaggccatcatcctcggctgcacggaaatcgggctgctgatcaagcccgaacacagcgagctgccgctgctggacaccaccgagctgcatgcgcaggctgcggtggcgttcgctttgcagggctaagccgactggcgcaggcgcgccatgctcacggtgtcgacaaaccggccgtcacgcagggcgtaatcacgcaatacgccttcgacctcaaagccgaacttgcgatacaaccgctgcgccgactcgttgtcggcgtacaccgtgagctccacccgatgcaggttcatccagttgtcggccacgtccagcgcggccgtcaacagccgcgaaccgactcccttgccctgccacgccgttgccacgcccatgccgaacgaaccgacatgggcctggcgcacacgcaggtactgttccaggcccagctggccgatcacctcaccgccatgcatcgctaccagttgcaggcgccgctcgttgtccatcaccaggcgtttgcgccacatctcgaccgactggaaaggcatttgcagcacctgacggcacacggccggttcgttgtagagcgctgcgacgccttcaaggtgggcctcggtgaagcgctggatcacgatatggggttcaggcgtgtgcatggtgtttcatcctttgaaagacacgtggtcgaccagtgtaggggcgacattaagccgatggctagggggctggcacggttgaccacaacgatggccagtcaccgtagccgaccccggtgcaacgcggcatccggtggaactcactgagctgaaagcgcttgccgtcgaacacccaagtggccccgccgccgcagtcaccgatgccacgctgcttgtagaaataactcagggacccggaagcctcgtcatagccgaccgcgccttgcaatgcggcgtcttccaagggcagcggctgcaggtccatcagggtttccgtatagggcgcctggcgctcacggctgctgacattgaactcgcagttgtaggccgcgcagtcataacgtgtcacggtcatggcctggcgcgccgtcagcgcccctgcttttgcctcgggctccccctcttccggcgtgacggcctgcaaggcggcagccaccagcccggcctgctcctgcgcggtcaacggcggtgccggcgaaaacttgcgcagtaccggcgttggcgcccgtggcggcacctcgctggccgcgcccttgccgggtcgagccagggccgtcaggttgtccacgcgaccctgcactgcatccatcaacagcagcgcagcactcaacccgctcagcgatacatgcgcctgttcatcacccggcaactgcaggcgctggccattgcgcagacgctgcaaccagcgccgcgcccctgcgtcatcaatcaccccatacgaatgcacctcgggatcaccgccctggtcatccagttcaacgtgcaattcccgcgtcagctccaggcccaggggctggccgtccagcagcaaggtggaaaggtccacctcctggcctcgataatcaaagcgcagacgcggatacccttgcggacccgcctgatgccagatgtgcaacgtcaatgagctatagtcctcttcatccacgccgctgggtgcgctgagggcgtgacaattgcgcaggttgtcgcaaccgaccacccactgcttgatctcacgcagcagcggtaccgcttcggaggggggttgggcgaagaccggggtggtggcgccggtgagcaacagggccaggaatgcggggcgcaacatggggactctccgtgtcgaaaaggcgcggattgtcccatgttcggggtttgtggcggtagctgtcagggcctggcttggccacgaactcgggctgcgcgcttttccaggtgttgcgcgtgacgctcggcttgctgcttgagggccaggcagtactcaggcaggcaatgttgagcgtctggttttacgacgtcatcggccagacgccgagcggttgcggcagaaataggagtgccgcgtggtttcaaccggcctttgatgatggcagcgcgatcattgaccagcgttggatggttgagtttaagtacttcgacggtggcaatcgcttcgggagtcaggccctctacataaccatcactggagtatcgaaactgccgctcgatattggctgtcagcggggaaacaaacggctttgtcaccgtgttgtaatcggccttttccaccgcgccgtagccgcaagcgactttgctttgactggatggatagcaggcgaccaagtttttgtaagcaatgttgctgtcagcctgttggtgtttttgcggaatgacatgctcaatatggcaactgaactgcgtgccttgatctcgagcctgacactcgaccgctgtcggtagccgtcgcaaggtataggcgcataaatgaaactgttccttcaggagcgcctggcgaaccgcttcgcttgggaaggtacttcccttgccgtagaaaagattgtggggagtgtcgcgatttacccttcgccattcaatcagtcctcgtggttcagagccttttctgatcgacctcacgcttcgccctcctctagcgagcgcaaggagtcaatggttgcttgagcctcaagaacatcgggaattttcccgactctccggtgcaactgcgttaaatatttttgggcggagtcaaggttatcatcgtcaagttcccgatagacctttctgagttgttggctcacatcttggttttgggctaatccccccatgaactcttctataacttcaccactgcgaaggccaagtgagcgctctggatgacctaggtattcaccggttcttaacagcatcacggacgctgctgggagttctcctagtatttgtggcgaatgggtcgtgatgatgaattggcagttggggaatgtcttttcaagatttgcaacaacagtgcgctgccagcctggatggaggtgaagatccaattcgtcgatcagtacaacacctctcccttccagtggatcaggcacctcgcggttgagcagtgtcaaccttcgagccaaatcacctaccattgcgagcaagcacttctcgccatcggaaagctgcaagacgttgaattcgagtttgcctttaagaacagtcattcttagagttggtttacgacgtactctaatatctttgaatccggtgaacgtttctatagcccgtcgaactgctgaaagctcgtgatcccgaaatcctgggaggtcacggctgatttcattttccaggtcttcctggttgcgaaaccagatgaaaaacctcttgaagtcagccccgccgtggccaagggcgtcgtcgtagccttcctcaatagtgttgatcaagcgttcacgaacacgtaacggtacatccagaacagcccgatgaacgtcgtagtaaacggcaagaggcagttgaacggacttgtctcctacgagctcataatgaattgcattgatctcgaacgatgcagcagcgttcttcagcaaagacaaatcactactgcgttctttagggtgctttccagactttcgatttagagctattgcccaatcgatgtcgcgctcgtcctggaatccgacaatgacctttagccttgtgtattctgcccctgccttgatgtcatcttttgacattgctctggacttcgacgcctgaccgacgatccgcgccgtcaaattcgaaagcgtaatcgccaacgcatccagaatcgaagacttgcccaccccattgacgcccaccaaagcgacagtctgcttaccctcgaaatcgagttccatcttctcgataccgcggaaattgacgagggtaaaacgcttgatctgcatgatcggcttccaacgtgcctggccgggtcagccagtcttcaaagtaagcacggatcatagtaattatcgactgatctgtcacggcgctgacggtggcagctatcatcgctgcgttgctacgcgccacacccgtgcaatatcggctgcccgttcgctgagcagacgcggcgcctcagcgcaggcctgttccaggctcatcggaccgctaggcaaggcaaatgccgcatccacgccatgggcatacatctgctcgtagccctcacccaaggtgccggcgatcacaataacgggcacgttgtgctgtcgggcgatgcgcgccacgccgaacggggttttgccgcgcagggtctgggcgtcgaaacggccttcgccggtgatcaccaggtcggcgccgcgtacggcggcgtccaggccaaccagttcggccactacctctacgccagcgcggaactgcgcgcccaggaaggccttggccgcaaagcccaagccacctgcggcgccgctgccgggttcgtcgcgcacatctttggatagcacgttggcgcaatgatcggcgaagtggccaagggcggcgtcgagttgttggacttgctcgggattcgcgcctttttgcgggccgaaaatcgccgaggcgccatgggggccgcacagcgggttgttgacgtctgcggcgatttcaaagcgtacctgcgcaaggcgtgggtcaagctgttccaggctgacccgcgccaggcgggccagggccaggccaccaggtgccagcggttggtcgtcggcgtcgaacagttgcacaccgagtgcctgcatcgcgccagcgccgccatcgttggtggcactgccgccaatcgccaggatgatgcgttcagcgccggcatccagtgcggcgcggatcagttcgccggtgccatgggtggtggtggtgcatgcgtcgcgcaggcccgacgacaccaattgcaggccgctggcctcggccatttcgatgattgcggtgtggctgtcggccaaccagccccaacgcgcctcaaccgctgtaccaagcggaccgcgcacgctgtggcggcgcaattggcccttgcacgccgccagcaccgcatccactgtaccttcaccaccgtccgccattgggcattggaccaactcggcatcgggccacacctgggtcagcccttcggcaatggcctgggcgacgccttcggcactcaggctgtccttgaacgagtcgggggcgatgatgattttcatgggctttctccggtttttatgacgcccatgctgccagttgccaccgccgctgacgccggtccgatgcacaactgcggcggtgctttgttgttcattccgacaaaggctggggcagcagctgaacgccgaggtacagggcgagcatgccgtccagggtcaacgggtcgacgccactgagctcggcaatgcgctccatgcggtagcgcaggctgttgcggtgaatacccaaggcgtcggcacaggcctggctttgcccgtcgtgttcgcaccaactgcgcaaggtggccagcagttgaccattgccgtccttggccaacactttgcgcagcgggttgagcagttcatcgagggcgtcgtcgttgcgatggcgccagagcatcaccggcaggcgatagcggttgagcgtgagcagccgtgactgcggcagcacatcgcgaccataggcgagcaaatcaccgacgcgccgatagcagcggcgcagccccgccagcccatccgcttgcccgcccacggcgacgcgcaggatgctccagccaaggccttcgagtttttccagcaggcgtgggttgtcgaccggcaccgtggccggccggcaccacaacaatgaatactgcgccgagctgacgcaccagctgtccggataacgcgaggtcagccaggcactcaaggcctctgccgattgccccgcgccgagttcgaacagatacggcgtgcgcgccatctgcggcttgagccccagttgctgggcttcgtccaccagccgcggcgagtcgccgctttctgccagcagcagagccagcaggtcatcgcaacgctggcgccgccactgttgctcggcctgctggtggcggtggctcaccagcatctcggcggtcatacgcaccagttcggcgtaggtgcgcaggccctccggctcgccagtgatgcccagcacaccgatcaggcggccgtcatgcagcagcggcaggttgatgcccggttgcacgcccttgaggtgcttggcggtctggccatcgatttccaccacgcggccattggcgagcaccagttgcgcgccttcatggcgggtgttgatacgttcgggttcgccgctgccgagaatcaggccctggctgtccatgacgttgacgttgtggggcaggatcgccatggtccgatcgacgatatcctgcgccaggtcatgatccagctcgaacatgcggctaaattccttgaaaggggtggttgttcatcggcacagcgcaaagcagggttcgctgtgcgcaagcacaaagacagcggcccgccggagggccgagactcttcaggcgatcaacgttaccctcgcatcgcgaaaaatcataataaagagagactcccatgtcacagagcgccgcagccacactggccaccgatgacgataaaaacgccatctacaagcgcattaccctgcgcctgatccccttcatcttcatctgctatctgttcaactacctcgaccgggtaaacgtcggctttgccaagttgcagatgctcgacgcgttgaaattcagcgaaaccgtgtacggcctcggtgccgggatcttctttatcggctacgtgctgtgcggcgtgccgagcaacctggcgttgaccaaattcggtccacgccgctggattgcgttgatgatgatcgtctggggcacgctgtccacctgcctgctgttcgtcaccacgccgacgcacttctacaccctgcgcctgttcaccggtgccgctgaagcgggcttcttccccggcgtggtgctgtacctctcgcagtggttcccgaccttccgccgtgggcggatcatggcgctgttcatgtcggccattccggtctccggtttgctcggcagcccgttctccggctggatcctcaaccactttgctgccggccaaggcggccttgccggctggcagtggatgttcctgctgcaaggtatcccgaccgtgatcctgggcgccctcgcctacttcctgctcagcgacagctttgcccacgccaagtggctcaagccccacgaacgcgcggtgctggaagccgaccaggcgaccgacctggccaacaagccgaaaaccaccagcgattcgctggccgaagtgttcaagaaccccgcaatctgggcgttcggtttgatctacttctgcatccagagcggcgtgtacgccatcaatttctggttgccgtcgattatcaagaacctggggttcagcgataacctggtgatcggctggctcagtgcaatcccctacttgctggcagcggtattcatgctgctggtgggtcgctccgccgacttgcgcaaggagcgccgctggcacttggtggtaccgatgttgatgggcgctattggcctggtgattgcggtgaacttcgccacgacaccggcgattgcgatcctcggcctgaccatcgcgaccatgggtgcgctgaccggcctaccgatgttctggccggtgcccaccgccatgctcagtgcgggcgcggcggcaggcggcctggcgttgatcaactccatgggccagatggccggcttcctcagcccctacatcgtgggctttgtgaaggatgccaccgggtccacggatgtggcgctgtacttactggcggcggtgattgtcgccggtagcgtattggcgttgcggatgacgcgtaccctgaaggcttaggtcgctgcggcaatcagagcagaccgccgccgtcgatatcgatcacggcgccggtcataaagccattttccatggccagcacataccccgccgccacttcctctgcttgccctactcgcccgacaggcaacgcggcgccggccttggcaaacatcgccaggcgctgctcctctgcaaggccggcatacgccggtgtatcgatcacccctgggctgaccacgttgacccggcgcggtgccaactccttcgccaactgtttacccagcgcttcggtggcggcgttgatgccggtcttgatgaactggcccggcgccaatttacgtcccagttgcccggaggtcaggctgatgctgccctgctcatccaggaatggcagtgccagttggatcgcccgcagcgagccccagagttttacgttgaagttgtcctgggcctcgctcagatcggtttcgatcaaggtcttggcacgcacggtgggccctgaggtgtagaccaggtggtcgaaccgccccacgcgttcgaacaagtgttgcaaggaccctgcgtcagtgacgtccaccggttcgctgcgcaggccgtttaccacgccgctggtcaagcgccgcccggccagtaccacctgcgccccgcgcgcagcagcggccttggccacggccgcgccaattccgctgctgccgccaatcacgatgacggttttgccgttgagggaagaagtcatggggaaattcctgattgagaaagtgagggttcatcttcccagcttggcaatcgacgaaaaatcccggtaaaacgacaagatctttaaaggatttttacaaatgagctcgaccctcgaccttgaagtcttcgtgcgcaccgccgacaccggcagcctttctgccgccgcccgcagcctcggcttgaccccggccgccgccagcattgccctcaagcgcctggaaacccgcctgggcattcgcctgctggcacgttccacccgcagcatgcgcttgaccgaagaaggtcgccgctacctggagagcgtgcgcgtcgcactggaggcgctgtccgagggcgagcaggcgatcaagcagcagggccagagcctcagtggcctgctgcaactggcggcgccctcggacttcgggcgcaatgtgctattgggctggctggatgcgttcaagctcgaacacccgaatatccgcctgcaattgctgctcaacgacaccaatgccgacctgttccgcgacaccgtggacattgccctgcgctttggcgtgccccgggactccagcctggtggcgctgccagtggtgcccgaccaccaccgcatcgcctgtgccagcccggattacctggcgcgtcacggcacgccccgggttccgagcgatttagcgcagcacaacacgctgcgctacatgcgtcagggccgcgccaacagcatctggtatttccgccagggcgcggtgttgcaggaggtcgaggtgtcgggcgattacttgagcgatgacggtgaaatcgtgcggcgctgggcgttggccggtcacggcatcgcctacaaagccaacctggatatcgcccaggacatccaggccggacggctggtgccgttgctgcctgactggcaaggcgagccgacgccgttcaacctgatgtgccctcaccgtcttcaagtatcggaacgggtgaaggtgctgcatcgttttttacaagcgcgctgcaagaccctgctgagtccatgaagaaacgcgcccagggcttgtcccagaacggccgagtctggtattgcatggggtacgttcccccgccttgaggagttatccatgatttaccgcacattgggccagtccgggttgaaggtcagcgccttgaccctgggcaccatgatgtttggcgaacagaccaacaccgaggactcgctgcgcatcatcgacaaggcctgggaccagggcatcaattttatcgacacggcagacgtctacaccggcggacgttccgaggaaatcgtcggcgaagccatcgtgcgcaatcgccaggactgggtggtggcgtccaaggtcggcatcggcccgctggacggtttgcccaaccgcagcggcttgagccgcaagcgcatattcaacgcgctggacgccagcctgacccggctagataccgattacctggacatctactacctgcaccgcgaagaccacaacacgccgctggaagtgacggtgtcagcgattggcgacctgatccgccagggcaagatccgctactggggcttgtcgaactatcgcggttggcgcattgccgaggtgattcgcgtggccgaacgcctgggtgtcgacaagccgatcatcagccagccgctgtacaacatcgtcaaccgccaggccgaagtcgagcagatcaccgcggcggccgcttacggcctgggtgtggtgccttacagcccattggcccgtggcgtgctcagtggcaaatacgcgccggacgtcactcccgaggccggcagccgtgcggcgcgccaggacaaacgcatcctggaaaccgaatggcgcgtggaatcgctgcgcatcgcccagcagatccagcaatacacccaagggcgtggcgtggggatcgtggagtttgcgattgcctgggtattgaacaattcggcggtgagctcggcgattgtcggaccgcgcaccgaggcgcaatgggatgcctaccttggggcgttggaggtgaagatcacggcggaggatgaagcgttcatcgattcgctggtgacgccggggcattcgtcgacgccggggttcaatgatgtcgggcattttgtgtcggggcgcatcgcccgcggttattgagctagaccgttcattgtggcgagcgggctaactgtggcgagcgggcttgccccgcgttggnnnnnnnnnnnnnnnnnnnnnnnnnnnnnnnnnnnnnnnnccaacgcggggcaagcccgctcgccacagttagcccgcccccgcagcggactaacgcgaaattttgctgaaaaatgccccaaaacagcgcaaccctctcgcggtaaaagcaccataatcccctgttcaaatccccctcttttcgtatcaatggtttttcgcgaggacagcgtgtctaaaggtgtcgtgttatcggtcttggcctcggtgttgtttgccgtgatgtattacttcacgtcgctgctcacacccttgagcggactggaaattttcggctggcgcatgttgctcaccgtgccgtgcatgacggtgttcatgatggtcagtggcgaatggcgacgagtgtgggaactgctgcggatgctggctgccaggcccgcattgattggtggtgtgctggtgtcttccgccctgctgggcgtgcagctgtggctgttcatgtgggcaccgctgaatgggcgtagcctggatgtatcggtgggttacttcctgttgccgctgaccatggtcctgaccggccgcctggtatggggcgaacagttgtcgtacttgcaacagatcgctgtcttttttgcaggcctgggggtgctcaacgagttgtaccaggctggtgggttttcctgggccacgctggtggtgatcatcggctacccggtctatttcatcgtgcgcaagtacctcaagaccgaccatttgggtgggctctggctggacatggcgttgatgctgccggtggcctggtggtttgtgcaaagcggcgagcaaggctttgcggtgctggatgcgcaccccaagctgtacgcgctgattccgatgctgggcctgatcagcgcctcggcgctggtgagctacatcattgccagccgcttgctggcgttcagcctgttcggcttgctcagctacgttgagccggtgctcttgctgggcgtggcgttgatcctgggtgaagggatcaagggcggcgaatggttgacctatatcccgatctggctggcggtgatggtgctggtattcgagggcttcaaacacctggtacgccagcgtaaagcctgatcggcaggcagcaaaaagcccggccaggttaccctcggccgggcttttttgtgtgcgtcagtcggtggtcaatacaccacgacgcacctggtcgcgttcgatcgactcgaacagcgccttgaagttgccctcaccaaacccatcatcgcccttgcgctggatgaattcgaagaacaccggccccatcaaggtttccgagaagatctgcagcagcaggcgcttgtcgccttcaaccgaggaaccgtccagcagaatgccgcgtgcctgcagctgatccaccggctcgccgtggttcggcaagcggccttcgagcatttcgtagtaggtgtccggcggcgcggtcatgaagcgcatgccaatcttcttcagcgcgtcccaggtcttgaccaggtcgtcggtgaggaacgccacgtgctggatgccctcgccgttgaactgcatcaggaactcttcgatctgcccggcgcccttggacgactcttcgttcagcgggatgcggatcatgccatccggcgcgctcatggccttggacgtcaggccggtgtactcgcccttgatatcgaagtaacgcgcttcacggaagttgaacagcttctcgtagaagttcgcccaatagaccatgcgaccgcgatagacgttgtgggtcaggtggtcgatgaccttcaggccggcgcccaccgggttgcgctccactccgtcgaggtagacgaagtcgatatcgtaaatcgaactgccttcgccgaaacggtcgatcaggtacagcggcgcgccgccgatgcccttgatggctggcaggttcagttccatcgggccggtttcgatatggatcggctgggcgcccagttccagggcgcggttgtaggctttttgcgagtccttgacgcggaacgccatgccgcacaccgacggaccatgttcggccgcgaagtaggaggcaatgctgttgggttcgttgttgaggatcaggttgatctcgccctggcggtacaggtgcacgttcttggaacggtgggtcgcaaccttggtgaagcccatgatctcgaagatcggctccagggtacccggcgtcggcgacgcgaattcgatgaactcaaagcccatcagacccattgggttttcgtatagatctgccatgatttggcgcctcatcattcttgtgttttgaaggtttcaattgccagcaaggatgaggagcacgggcggcgcacaggaaaggcctcgcacactgcgggcgaggaagtcaccaaagatgaggggggagccgagtagcttcatggtgtcatcggtctctgacggcttaggcttgcgtgagcgcaagtccatattcttgtatgcgtaaatcgattctacacagcgtaaccaggtttgtccgtactcttatcaaatccccattacccgtacccgtgcaaggggtttattgcacaggtagatgcccgccaggatcacggccccgcccagcagcatcggctgggtgaaaggctcgtccagcagcaaggcgccgcagatcaccgccgtcagcggattgagcgcgatgaatacaccactgcgggtcgcgccaatacgccggatgccatcgtaatagccgatatacgccagggccgagcccagtacaccgaggtaaagcaggctgtacaactgcggcaggtggatagcagtgagcgcatccagcgtcagccgtccgctcagcaacgtggtggccgcgagcatcagcgttcccagccacaccgaccaggtgacggtctgcaaggggcccaggctctggttcagcgtgcgtgagcccaatgaatagatgccccaccccgccacacagccggcgatcaacagatcgccgcgccaggcgtcggtcgcgccctgcagccccagtgggtcgcggttgacaatgacaaccgccgcgcccgccaggcacaacgcgattcccagcgccttgccaggccccaggcgctccttgaataacaggcaggatgccaggccaatcaccgctgggttcaaggcgacgatcagcgacgcccgcgacgcgccgatgtactgcaagccatagaaaaagcacaggttgtagaaaaagatgccgaagaatcccagcaatgccagtcgccccaactgcggcaggtttggacgggccaggggaatgcgcgcgaacgccatgaacagcaacagcgcgacgctggccagcacaaaacgcaggctggccgccagcagcgggtcgacggcaccggacaaagaacgcccggcgacgaaggtgccgccccagatcatggagacggcagcgagcttcaggtaggtcaaacaatcggttgaaggtttcatcggggtattgctctggcgttggacgggttagcctagtgtttgcccaatacctgatcatcgtaaaatgagtaaacactcatgaccctgacccaactggaaattttctccctggtcgctgagctgcaaggctttacccatgccgccaaccgcctgggtatcagccaatcggcggtgtcccatgccatcaagggtctggagcaggaactgggggtggagttgttccgtcggcatcaagcccatgtggcgttgaccgacatcggcgaacaattgctgttgcgcgcccgcgccatgctcggcctggccaacaccctggagcaggaggccgccgatgcccggggcttgaagcgcggcacgctgcgtatcggctccttcgggccaacgtcgtccaatcggctgttgccgcagatcctgcaaccgtttcgccaggcctaccctgacattgaggtgcatgtcgatgaaggcccggaccgccaggtcatccaatggctggatgagcggcgcatcgacgtgggcttcgtggtgctggagcaggagcggttcgacaccttcgcgttgttcaccgatcagatggttgcgctgttgccggccaaccatcccctggccgaacaccctgccctgcgccttgaagacctgtgcgagacgaccttcatcctgaccgaggccggctcgtcggagctggtctcacgcctgttcgccagcgcccggctgacgccgaaggtgcgttatcgttgcgcgcaactgctcagcacgctggaagcggtaagccgtggcgatggcctcagcgtggtggcccagggttccctgccggttacgccagatccgcgttatgtggcgcgcccactggcaccggccattacccgttcgatcggcctggcagtactggatcgccgccaggcgtcccctgcgaccctggcgttcatacgcgtggcgcagggcctggactatgggcatgtctcaccgctatagcgactggcgatgatggcgcagcgcgccgttgtcatccacggtactgaatcgcaggctggccgcaccggatggcgccttcaggaccgtgtcgaaggacaggtgagtggcggaccgtggggcaaccatgggtgggttgtgatgggggtattcgacgccttcgacaaccagtaccaccgacgccagcgtcacgtgaaacgcgctggggttgcgcactagcacaactgttcgctgcccgccgaccaggcgccaggccaatccgctcgcagcatccactgcgccgttggcaagcgccaccggtcgcaggaacagtttgatccgcgtccgaatcgcccattgcaaggtattgccgcccgtggcgtcggtggcagagggtcgaacactcagcacgttgagccagtacagggcttcctggtcggcaaccggcacaggagcttcgcttggctggtagacaatacgcaacgctgcacctttgcccgcgtcaatgcgtttgatcggcggcgtgagggtgaagggcacatcgctgtattccggtggcaactgcgcgtcacccttatcgatccaagcctggaccagcctcgggctgtcggcttgattggtcagttgcaggctcacttcacggctacccatggggtagatgatgcgtgtacggtccaacaccacgtcaccactggcgatggtagcccacaacgtgccgaaacacgccgccgtccagcagagcaagcccgtactcatcgataactcagggtgaacgtcgcctgcccattggccgttccggcctggatgcgtgcggccgtttgcacgtagcgtgccgtgagtggaatggtaaaggtgccattatcggtggtgcccgccagccactggttgggcgtgccgattgcgctggagtcggggccgtagctcagcagccggtcctggtgcagcaactgcagggccacgccccgagcattcgaatcgctggtaagagacaggcgattgctacggttggctggcgcggtctggtcggtcagggtcaccagcacatcgaggctggcaccggtaccgccggcacattgcaacacgatggtctcggtgacggcccctgcggtgctgccgatgccactgaaatcacgcgccgacaccgtccccaggcgcattgccaggctgggtgtcgagacggaacacgtcggtttgcgcggcggcccgatcaacgtgctgcccagggtgatcatgtgctcgcccgtcgccgagcgcacggcgaagcgggcgatcgggcgggagccgataatgccgccctggatcgtgccggtgacgaagaaaaacaaccgcccccgcaagccccagctcggtattccggggtatatgggcggatgcaaggcgctgataccggtactgaccgcctggggtgatctgttgtcacggtcttcggcaatcatacccatcccgacccccgcgacaccggtccggtaaatcggcatccgcaccccataatgaaagtaaaagctccctgtgaagttcaggtcactgctcagggatatgtagctccagtactcactgaacacatcgtcgtatcggcaaaccatcgcattgggaacgtcgaacgtataaccatccgggttacccagtacttgtccggggctcgggttaacgggcagcgggtcgatggcgggcacgttgatcagagtcggggcggcggcatcgcagtcgccacccgcccgggccacgggcagtgtcagtgccgttaacagcagcgccaggacacaggcggcaaggcgcttcatgggatggccacgcatcgaccttcccacacctgcgcgctgcgctggcgctcggcggaaggtctggacggcaattggtagacaatgacgcaacgtccatccgccgcagcgctccaacgcacagtcagccggccgctgtcgctgatacccctgacaaatgccttgctcgcctgccccactaccccgacttcgcgcccttgttcatcgaacacctgcgcggcaaacggcaagggcttgccgttgtcccggcgcgccttgacgatcacggcgcgaccgctggcgaccttgaagcgcaacagcgtcaatgcgcccagggtgggcacgacactttggctggactccagcagctcgacgtccacgggcatgccattgggatcaagcgtcaccacattgcgccggaatgcttgcaggttgggcgccaccgcataaccatccgcgccgatacgcgcgtggccgttgttgagtgctgccccctgcgcgtttggggcgtgtaccagggcggcggattcgcccaggctctgggacaggatcaatccgtcgggatgagcgaccagcgcgccatctgcgctgaatgccagttgcgcaccctggttggattggccataacccaggcgcatcgccactgcctcaccgcgatagccggtgtaagcattcactgcgctggcccgtgaacctgctgctgcgctacggttggcccaaacgccataatgagcgctggcatcctcccccagcagaccattgagacccagttgctgttggctaccgcgccggtcgccacggtcccaatgctgggtgctggtcaatgtgggggcgcgcagtcccgcacccaccggcatcgacaaggtcagggtgatgcggttatccagccgcccgcgctggccaacatcaccaaagaagagcgcgtcgctgtgttccctcgggctgcgccgctgctcgtcgcgcaggcgagtgtcttcgacacgtgaacgctgcatcgagacattccagcccaggcgtttccaggtagccccgtagctcactgaaaaggtggtctggcgcccctgctgccgccgccaataggcggtggaactgccggacagagttaacgttccgccgcccaattgctggctgacattcagatcgatgcggcttttctgcctggccaatcgctccgcgccatagccttttctcaggccttcctgtgcgctcaaggcatcgtacaaactgaaataccccggcgtggagtaacggtacatgcccagtgcgaagtgagtaccggaggtcggcacgcttttgtaataacccaggcccaggctgtgccccgagcggttgccctgcccgtccagccgtgtgcgggagccggtggcatccagggaccatacgcccaacgcagtgcttgccgcgacgcccaatttgccctggtgatagccctgggtgccggtgccgccaccgtacaccgtcaacccgtccgccacaccgtgggcaagcgtgccctgcaccatcgctggcatgcctgcggacacgccgagctggttcacctggcccaggctcacctgatagtggcgagccccgctgcgcaataacagcggtgttgcggagtacggcaccgtgaacgtgttccgccgcccatccacctcggtcacgctgacggtcaagtcaccgccatacccggtggctggcaggtcattgatctcgaacggacctggcgccaccgtcgtctcgtagagcgtgtagccattctggcgaatggtcacggtggcattgccttctgccacgccacgcaccaggggcgcataaccttgacgggacggggccagcatccgctcatcgctggccagggtcacgccccgtacgcgtacgccttccaggatctgcccgctgctgaaactgtcgccgactcgcaactgcgcctgccataccgggaggctgcgttgcgcaaaggtcgaggtgttttgatagggcggctggccggtcgccgaatcccaggtctgcgcgccttggtgccgcaggcgccagcggccgaggttgaggcccgcattcaggcccagataagcacggtcggtgcccgcgcccgccgtcatgcgggtagtgctgaaggtgtaattgagcaggccggcgttgatgccttcatcccagtaagacgggtcgataaagccacgggggagttgtctgacgtacacctggggcaggctcaccgtccactccagcgcggcggcgtctacacggcttgtcgccgcaggcagccaatccgccagcgcgggacactcggaagccgtgcgcagcgtgccgatgcgctccggtgcgacaccaagttgcagcagcaagtcatggtcgacacagggcacagcatcggcttgtgcgtcagtggtcatgaacgttacttcacggcggcccatgggctggccgttgacaatgatctccataagatgagtgccagggctcatcaggtcgtagcgactgaaccgagacacatcgacggccgcgccctcgctggaaaaggcttgcaggtcaaacaccggctccgcggctgtcgcatgttcaatcgacgtcaatgctgcactgatcagcccggcaagcatcgactgcctgttcacggtcaaagcctcagcgcagcacgctgcggcggtgagaacgcgccatagtcgttgatgtactggaaatgcacctgggcatcggccggaatgtgcggggcggcttcgtggaccgccaggcgcaaggtatcgcccggcgcaaccatcccggtgtcgctgcgcaagaggcgagcatcggcccgtggccccaaggccagcgcaacctcttggaacgtgacatgaaaggccgacgggttatgcacctccagcccctgtcccgtcgccgtcttgtagagcgaccaacgtaattgccccggagcgtcatcgggctttcccggcagctggtcaggacggaagaacactttggtgcggatgcggaacgcaaaccgcagttgattgccttgctcgtcgtccagcggagccgatgagtgaaaccttggcggtacctccagcacattgagccagaacagtgtttcgcggtctttgggcaatagctctcgggaatacaccaggcgcatggcgtggcccttgcccgcgtcgatacggaacaccggcggcgaaaggctgaacggcacgttgctgtcttccggaccgacccgccgatcaccgggttcgacccacgcttggaccaggcgcggtgctgcggcgtcttcgttggtcaattggatggtgatctcagcctggcgctcagggtagatatggcgcgttccgttgataatcacgccggcatcgaccgtcaccggtgcgccgggcaacagtgcggccagcagaaatcccaggcagcgccgggcctttgtcaaacaccccatggctgcgcactcctgttcccggctcgctcagggaaaggtcacggagtactgcaccgccgcctggactggcccattaccggccgcgccagtagcgatgtaccgcgccgcaaatggcaacgttgcaatgccatcgtccggaattgcgggggtggatgtcgtccccagccgcaggtcgatgggccggttcacggccccatcgatgatttgcacctccacattcgccgcgccggaggcggccgtgttgagcagattccccgtcagcgggttgaccccggggctggtgctctcgaacaacaccgccaccgaagacgccgcacaaggggatgccgtaccgcccacgtagatgaaaaagggcttgctgccggccgtatcaccggccgccttcaacgcggaggcctgcactttgtccagcgctaccggaaagctcgccccggtgcccggccctgatccggtccccccggtaatcggacacgtgctgccaacaatatcgccactgagggtgatgatgccgtctgctgccatgacaggcccgacgatgatacccatgaatgtgagaaacgccgctgcccgccttttgcttttcatgatgcgtccaccttagaaaaaccgacgttttgatcataagtaacgtgcgcaaggctgcctactgaccgaacggctaggtatcccgagcttattgcggcgactgcaactatcatcgagacaagtccgacctgccgtgctgacacctctctcatctcgcaacaggcttacatcccatgcccctgaccgtccaaggcccccgcagccgtgccacccgcaacctgatcagcgtgttctgcgccatggtgccgcttgcattgggcgtggtgatcctccattggcaagccgaacgtacccttgaacaaagcacggcccagaccgcacaggaagccgtacgccaattcgacttgatgctcgataacaccgcgctcgccgcccaggcattgctgccgttggcaggacagccgtgtgataacgccgcacagctggccttgcgtgaacaggtcacacgccgcccgttcgtgcgggcaaccaccttgtcctggcagagaaacatctattgcagctcgctgtttggcgaccaatacgcgtcaccggtcaacccggatgattacgtggacggcaagttatggctaatgaatggcaacccggtgacgccggataccgcactgctggtgtaccggctggtcgagcgcgacaaggccgcttttgcgtcgatcgacggctaccacctgaccaacgccctgcggctgatcagcccctacgccgacctggtgctgcaagtggggacccattggctgggggccgatggaaaagtgcatgacacagcggttccggtatttgccgtggcccaccatcatcttgcatccgcgcgttatcactacagcgtcgacgcgggcatgccggctggcgaagtctggcgctacatgcaggcacgatacccggcattgttcagcctgctggtgttttttggcgtggcggcgggagtgcttgcgcattggctgcaaaagcgttcttcggcccctacccatgaactgcgacgggccttgggcgccaacgaattcattccgtacttccagcccgtggtgcgcggcgatacccgtgaatgggcaggctgcgaagtactgatgcgctggcaacaccccaaggaagggctggtgcgacccgatctgtttatccccctcgccgagcattcgggcctgatcgtgccgatgactcgtgccctcctgcgccagaccgccgcgcaactggcgcctcatgccacgcgtttcagcccgggattccatattggtgtgaatatcaccgcacgccactgccaggacctggcactggtggaggactgccgcgagtttctcgccgcctttcccgtgggccaggtgaccctggtgctggagttgaccgagcgcgagctgatcgaacccaccgacattacccgccgcttgttcgacgcgttgcatcaattgggagtgatgattgccattgatgatttcggcaccggtcattccagcctcgggtatttacgcaacttcaatgtggactacttgaagatcgaccagagttttgtcgccatgatcggtgcagatgcactatcggggcatattctggacagcatcatagcgctgtcgggcaagctcgacttgggcatcgttgcagaaggtgtggaaacgcgcgaacagtgtgaatatctggccgctcaaggggtggacttcctgcaaggttacctgtttggaaaacctttaccctgtgatgaatttattaaatcgctggcgcgtcattgaatagccatgcactacctgcactgaaatagttgggtctagagaaaagacatgatttactcgtgacgcattaactactacaatttttcctgcctgtgcagaactcgcgggatgacttctttcctgggtcgccttaaagcgcttggcttatagctttgtctgcagttgatatcagccaactacactattggagtacagattttgtccagactcgccgaatttcgcgcagcagaaaaagcccttcaagagcagcttgcccagctggaatccctgaagaacgatgctggcctgaagaaagaaatcgaattcgaagaaaagcttcaagccctgatgaagagctatggcaaaggcctgcgcgacatcatttccatccttgatccaaacccgggcaagtccagcgcagttgctgccgcacctaaacagcgccgtgcgcgtgtggtcaaggtttaccagaacccgcacaccggtgaactgatcgaaaccaaaggcggtaaccaccgtggcctcaaggcctggaaagaacagtacggcgctgccactgtagattcctggcttcgcggctgatcgtactgcacttataaagagccccgctgacgcggggcttttttattttatgggttcgaaatcgaacttaaataacatttcactttgttcaaaaacgacaggcctcacgcacttaaagtttcaggctgtcgcgcaccgaactgacttcttccttgcttgcttcgtacgcctcggcctgacctgcgtatgaaaaaacatacgccttatcggtatcaaccgcgcccaccaatgtttgcgagagcacgtgccgcccgttctcggttatcacgcaagtagtttccaacgcttcaagacggctcaatgttgtagggtgcatcttgctgcacacgctttgataaccaccctgggcgaaatccttctggatggatttgcgcatctccagcagtacgccttgaagattaaccttatgaccaacttcaatcggcgtcccggtcaactccatgaccatcagggtcgtaccgttttcatcattcttgattgcccgctgccgcgacactgccaggggcttggcaggcgcctggtcatccgccatcgcttcttcaacctgccacccgctaggccaatgaatttcgggctcagcggctactacgcaggaactgcccaaccacaagcacagcatgctcaacaacggtttacgaaattcggtcattacgaaaaacacccaaggtccaaggaccaaagtttgagccccggcacccacaggccgcaaggcctgcgtggctttttcatctggcgaccgggccgagccttgcgtatcatggcccggctgcacggatgccagccgcaagccaaggaaccgctcacatttcagagccgcgtttgccccattttttctggagggcccatgagcctgcacgaactgaacaccttcccgggcgtcactgcccaacctgataccgccaccgccaacttcgtgttcaaccacaccatgctgcgggtcaaggacattaccaagtcgctggacttctacacccgcgtcctgggcttttccctggttgaaaaacgcgacttcccggaagccgagttcagcctgtacttcctcgccctggtcgataaatcccagatcccggccgatgctgccgagcgcacccagtggatgaagtcgattccaggcatcctggaactgacccacaaccacggcaccgaaaacgacgccgacttcgcctatcacaacggcaataccgatccgcgtggtttcggccatatctgcatctcggtgccggatatcgtcgccgcctgcgagcgcttcgaagccctgggctgcgatttccagaagcgcctgagcgatggccgcatgaagagcctggcgttcatcaaggacccggatgcgtactgggtcgaaattatccagcccgcgccgctgtaacgaaaaaaccccatgatcactcatggggtttttcatttgccgggcctggcttacgccggggcagaagtccggatcaggtggtcgaacgcactcagggaagccttggcaccctcgcccaccgcaatcacgatctgcttgtagggcacagtcgtgacgtcaccggcagcaaatacacccggcagtgacgtctcgccacgcgcatcgacgatgatctcgccacgcggtgtcaattccacggtgcctttgagccagtcggtgttgggcagcagaccgatctggacaaagataccttccaggtcgatggtcttgaactcaccactgtcgcggtccttgtacgccaggccggtgactttctggccatcgcctttgacttcgctggtcagcgcgctggtgatcacgtcgacgttcggcaggctgtagagcttgcgctgcaacacagcgtcggcgcgcaacttgctgtcgaactcgagcaaagttacgtggctgacgataccagccaggtcgatcgcggcttccacgccggagttgccaccgccgatcaccgccacacgcttacccttgaacaacggaccgtcacagtgcgggcagaagcacacgcccttggccttgtattcctgctcgcccggcacacccatttctctccagcgagcgccggtcgccaggatcacggtcttggacttgagggtcgcaccgctttcgaagcgaatttcgtgcaggtcaccggcgtttttcgccgggatcaaggcactggcgcgctgcaggttcatgatgtccacatcgtactgacgcacgtgagcttccagggcgctggccagtttcggcccctcggtttcctgtaccgagataaagttctcgatagacatggtgtccagcacttgcccgccgaaacgctcggcggcgacgccggtgcgaatacctttgcgtgccgcgtagatcgcagccgacgaaccggctgggccgccgccgacgacgagcacatcgaaggcgtctttggcgctgattttctcggcggctttttcgatgccgctggtgtcgagcttggcaagaatctcttccaggcccatgcggccctgaccgaagttcacaccattgaggtacacgctgggcaccgccataacctggcgctcgtcaacctcagcctgaaacagtgcaccgtcgatggcgacgtggcggatgttcgggttgagcacggccatcagattcaacgcctggaccacatccgggcagttctggcaggacagcgagaagtaagtctcgaagctgaactcgcctttgagggcgcggatctgttcaatcacttcgacactggccttcgacgggtggccaccgacttgcagcagggccagcaccagcgaagtgaattcatggcccatggggatgccggcgaaacgcaggctgatatcggcacccgggcggttgatggagaacgaaggcttgcgcgcatcgttgccatcggtcttcagggtaatcagcgtcgtaaggctgaccacgtcctgcaaaagggcaagcatttcctgggatttcgcgccgtcgtcgagggaggcgacgatctcgatcggctgggtgacccgttccaggtatgacttcaactgagctttaagattggcgtccaacatacgggcgatttcctgttcattcggtttattgcagacaaaaaaacgcccgagcgaacctcgcccgggcgttctgagggcggatgcagcttacttaagtgcggattcccgcccttgagacttcacagacttagatcttgccgaccaggtccagggacggagccagggtggcctcgccttctttccacttggctgggcacacttcgcctgggtgggcagcaacgtactgagcggccttgattttgcgcagcagctcggaagcatcacggccaacgccaccgtcgttcagttcaacgatcttgatctgaccttccgggttgatcacgaacgtaccgcggtctgccagaccagcttcttcgatcagtacgtcgaagttgcgggagatggtcagggttgggtcgccgatcatggtgtactggatcttgccaatggctggcgaagtgttgtgccaggcagcgtgggcaaagtgggtgtcggtggaaacgctgtagatttcgacgcccagtttctggaattcggcgtagttgtcagccagatcttccagctcggttgggcaaacgaaggtgaagtcggctgggtagaagaacacaacagaccacttgcctttcaggtcagcgtcggacacatctacgaagttgccgtttttgtaggcggtagctttgaacggttttacttggctgttgatgataggcatcgttgactctccgtcaggtttgtagaagggcttagtaagttgatgaggtgaatcctacccactctctacgccgatggctcattggcaaacctgatgctgacgattggttttccctatcaggtgactgtattaatagaagaaatctcaaagcagcggctggctcgccaggctcatgccgagaaagggcgtcgcttcaacatagcgcatggcggatttcatgtcgctccagccgacgtaactcatcaacgacttcaaatcccagccgctgcgatgagcccaggtggcaaagccccggcgcagcgagtggctggtgtagtgctcggcgggaatgccggcacgctccagcgcctggcgcagcagcgggatcacactgttggggtgcaagccctcctcccccaggttgccccagcgatcaatcccgcgaaacaccgggccacgtaccaaagccgaggcactgagccactcgctataggcctgcaccgggcacaggcgcaacagtgccggagtgtgataggtcttgccgagattgtcgcggtcgcttttgctgcggggtaggtacaggctgatccctgcaccgggcatcgcttgcacatgctcgatagagagacgacacaactcgtcgctgcgaaagccacgccagaatcccagcaggatcaatgcggtatcacgcttggcacgcagcaatcggggctggttctgtgtttgcgccgcttctatcgcttcagcgtcaagagaagcaaccacttgctccagatgcttgagctgcaacggttcggcttgcttctcccgcaccgggtgcactgcacgaatgcccttgagcaccttgcgcaccacggacgccttggttgggtcaggaaacccctggctcgtatgccattgcgccagtgccgagagtcgcgacttcagcgtgttgaccgccagcacaccggcatgggcgaccagatagcgcgccacgctgtcgctggtcgccggcaggaacccgccccagctcacttcgaaatgctcgatcgctgcgcgatagctacgccgcgtgttgtcgcgggtggcagcgttgagataacgatccagatcgctcatgggaggcctattcgtactgttgactgacgcattagcggattaaaccgtaatgacacgggataatacgccaatatcccatctgttaaatgatgaatttaaacaagttttatacgtgatatagtatgtatatacataccacgtaccacattacgaaatcgacggagaccccatggctcgcggcggcatcaacaaagcagtagttcaaacggcccgcttggcaatcctcgcccgcggcgagaaccccagcatcgacgcagtgcgtatcgagatgggcaataccggctcgaaaaccaccattcatcgttatttgaaagagctggatgaaagcgaaacccgcaccaccatcaccgaagcgccaatcgacgacgagcttggcgaactggtggcgcgactggcccagcgcctgaaagagaaagcccaggaaccaatcgacctggccctggcgcagttcgaacagcagaaggccgccctgctcgccgaggtgcgagcccttgaggaggcccatggccaactccagcagcagttcgatatccaggccgccgccctggcagaagaaagcgccgccctgcaaaccgccagcaccagcctgcagaccgagcaaacccgcaacgccgggctgagccaggcgtgcagtgactacgagctaaggatcaacgacaaggacgagcagattcgttcattggaagaaaagcacctgcatgcccgggacgcgctggagcattaccgcaatgccatcaaggagcagcgcgaacaggaacagcgccgccatgaaggccagttgcaacaggtacaggcagaactgcgccaggcccaacagagcgccatggtgcgccaggatgaaatcacccaactgcatcgcgacaatgagcggctgttgatcgagcatcgggtgacagcgaaggaattgaccgcactgcaggagcaatcccgcaaagatcaggcccagcagctcaaactgacggaacaggtgagcctgattgacagcgaacgcaccctgcttcaggagcgcctgcgggtagcggcgctggagagccagtcacgccaggaagcactggacgagcaccagcgcaccaataaaacgcttgagctggcgctgatcaaggctcaggccagtgtcgaggcgttgcgcctggctgccgccgttgcagcggcgccagaggcaacgcccaaggcctgatcaacccgctacgggcgtgcgcatggtgacgaactcttccgccgccgtcgggtgcacgccaatggtttcatcgaaatgctgcttggtcgcgcccgccttgagcgcgatcgccaggccctgcacgatttcccccgcatccgggccgaccatgtggcaacccagcactttgtcggtgtcggcgtcgaccaccagcttcatcagggtcttttcctggcactcggtcagggtcagcttcatcggccggaaacggctttcgaagacctgcaccttgtgacccttctctttcgcctcttcttcggagagccccacggtgccaatgttcggcagactgaacaccgccgtcgggatcatcttgtaatccaccgggcgatactgctcaggcttgaacaggcgacgcgccacggccatgccttcggccagggcaaccggcgtcaactgcacacgaccgatcacatcgccgatggccaggatcgaggactcggcggtctggtacaggtcatccacctcaacgaagccacgcttgtcgagtttgacgccggtattctccagccccaggttatccagcatcggacgccgccccgtggcgtagaacacgcaatcagcttccagcacccggccgtctttcagggtggccttgaggctgccatcggcctgtttgtcaatgcgctcgatgtcggcattgaattgcaggtccaggccgcgcttggtcagttcttccttcaagtgcgtgcgtaccgaaccgtcgaagccgcgcaggaacaagtcgccgcgatacagcaacgaggtctgggcacccaggccgtggaaaataccggcaaactcaacggcaatgtaaccgccgccgaccaccagaacacgcttgggcaattccttgaggaaaaacgcttcattggagccaatggcatgttcgcgccccggaatctccggaatctgcggccaaccacctgttgcaatcaggatgtgcctggcggtaaagcgctggccattgatttcgacctgatgcgggtccaccaggcgcgcatgcccttcatgcagggtcacgccgctgttgaccagcaggttgcgataaatgccattgaggcgattgatctcgcggtccttgttggcgatcaaagtggcccaatcaaaattcgcctcgcccaacgaccagccaaaaccgccggcctgctcaaaatcctcggcaaaatgtgcgccgtacaccaacagttttttcggcacgcagccgacgttgacacaggtgcctcccaggtagcggctttccgccacggccaccttggcaccaaagcctgcggcaaaacgtgccgcacgcacaccgccggaaccggcgccaattacatacaggtcaaaatcgtaggccatttcactctcctcggcaggacatcagcataccgacttagatggggctgaaaaacgaaaaagccacccgaaggtggcttttttggaacaggctgcctacagcgtgaatcagtaagccttgccagtcttgtagaagtgctcgtagcagaagttagtcgcctcgatgtaaccctcggcaccaccgcagtcgaaacgacggcctttgaacttgtaggcaatcacgcagccgtctttggcttgcttcaacagggcgtcggtgatctggatctcgccacccttgcctggctcggtttcctcgatcaacttgaagatgtccggagtcagaatgtaacgaccgatgatcgccaggttcgacggagcatcttccggcgccggcttctcgaccatgtcacgtacgcggatcaggccatcaccgatgtcgtcgccggcaatcacgccatacttgttggtttcctgagggtcgacctcctggaccgcaacgatggtgcaacgatacttctggtacagcttgaccatctgggtcagtacgccgtcgccttccaggttcacgcacaggtcatccgccaggaccacggcgaacggttcgtcaccgatcagcgggcggccggtcaggatcgcatggccgaggcctttcatctgggtctggcgggtgtaggagaacgagcactcgtccagcagtttgcggatgccgaccaggtatttttccttgtcggtgcccttgatctggttttccagctcgtagctgatgtcgaagtggtcttccagcgcgcgcttaccacggccggtcacgatggagatttcgttcaggccggcatccagtgcctcttcgacgccgtactgaatcagtggcttgttcaccaccggcagcatctctttgggcatggccttggtcgctggcaagaagcgagtgccgtaaccggctgctgggaacaagcatttcttgatcatatgggtccttacaaagggctgtgcgtacggaattcggcgcagtctaatcaggccgcagtcaccttacaatgggtcctgctggcgttgcgatgtcatcatagagaaaaaatgtcggcgtaagttccgcgcatcttacgaagcgcatctgcaccggcacggccaaaaaagcctgcacctcagtatttccaagggctacgacctttttagcatgcttttacggctgcaacactgacctagaataacttgcgcgtgcccgcgacatttggcgctatcattaggcccttgaaccagaccacgagatacttgatagatgtcagaaccaaaaggcgtgaacggctacctgatcaccaagcgagcggacggttggcacctgatcaacttccacggcgacagcgtcgccggcgcattcgccagcgaaagccaggctatcgctgtagccgaagtgtttgtcgatgaagcaggccacgcttcgagcaagcggcccaagggcaagtaaacgtcaacgccctgtgcaaaaggccccgctgaatggggcttttttgtgtttgtctgtacgtagatggcagttcgctataatctcgccagaacgccccacgacagtgtcagcgcgccctccaacaccctcgatgatgaacctacatgaacaagattctggcactgactgcagcactggcgctcgccggatgcaccaccacctctgatgtctacctgaaaaacggtgagcaaggcctgaccatcgactgctcgggcgaagccaactcctgggcgagttgctatgagaaggctgatgcctcttgcgcaggcactggctaccgtatcgtcggcaccgaaggcacaccttcgctcaaggaaagtgaaaagaccctgggccaggacgtcggcaacttcaaaagccgcagtgtcgtggtggtgtgcaagtaagcgtcgcggctacagctggatatcggcgaacttgatacccaggccacgaatggtctccaccaagtcatccagccgtgggaacgactcgacttcatcctgatcgtccaccaggaaaaagctgcggccgccgcttttcttgaagaatacgatccactcccccaagtcggccggattctgaatgatatgagtggccgatatctggccttcggcctggcgagccctgacgtgttcacgcttcataaaagacttcccgaaaaaacaaatgccgcacaaaccgagggtttgcgcggcatttttgcattgaatggctgagagtttaacggatgccctgcccaatcagcacgccttctacggtttggccgtagagattgatgccgtcattggcgtggaatttaacccgggtcttctccaccgaaccgtcaactagccgcgggtcctgcggtcgttcgtggctgttgacgtaggccgcaacgtcccacgcttgctggtcgctcaggctgccgcccttgcccaatggcatgttgtgcttgatgaaggacgccgccgtattgatgcggtgcatgccggccccccaattgtaagaatccttaccccacaacggtggcatcacgtagctgtcaccgaccttctggccctgaccttcgacgccatggcagaccgcgcattgccctttgtacacctcggcgccttgggcgatgtcgtaacccttggccggctgtgccacgtcgggataaccccggcccggcaattcaacgcctaacggcgccttgctggccagccagtaggcatacaccgaaagcgcagtaatttccgggctgtcagcagccggcggcgtaccgccattcatgctgaattggaaacacccctgcaatcgctcggcaaaggtattgaccttgtcgttcttctttcggtacgccgggtacatagggtaagccgcccataacggcgccgaattggccaggcgcccctggtccaggtggcaattgctgcaattgagcccgttgccgacaaatttcggcgctaggcgccgggtatccacgaacagcgcatagccatccttgaccagcttgccgtaggcgttgtcgggcagctcactttcctgaggtggctggaattgactgaccggtgcgtggccggcgacaggttgcaactgcgattggtcttccatagcaatcgtcgccgcctgggctgacgatatgcccaacaggcccaaggccaatatcagcgggctcatggcttggcctccaacttcaacgctgcgaaatactgggcgacaccctgcacttcttccgaggtcagggctttggcgatatgccccatcaagtcattcggatcattgtgacgggttccgttttgccaagccgtcaactgggccgccaagtaagcggcaggctgaccggccaacggtggaaacgcatcgccgacacccgtaccggccgggccgtgacaactggcacacgctggaatctggcgctcccacgccccctgctgcgcaagtttttgcgcagcgccgacaggcatctcgctgcgatgaaccatttgcgggaccgcgccaggcatcgccgccagcgcctgactgaccgcgtcgatttcagcgtcggtgagcgcagtcgccaagggttgcatcaccgggttggcgcgactgccgtgcttgaagtcttccagctgtttacgcaggtagagtgcaggcaagcccgccaaccggggaaaacccgctgcggccagccctgcgccatcggcaccgtggcaggcgacgcagggcatggcgccgggctgcgaaccgccttcggtgaagatcttcttcccatccaacgcgcaggcattgcccagtagcaacatcagcgcactgcccaccagtactcgttccagagacatcatcacgactccatttttatagttatatgcttaggcgtttatggcataagcctacaaatggtaggggaatgagcccctcgcgacaactcccaaaacgcgccatcaaaaaaagcccggtcccacaatggcggggccaggctttttgatcggattcgaagtggctgggtgaaacggcgcttatgagccggaaatgcactcttcgccggccttcttcacatcaccgggacggatcggcacattggacatgctctcgtagagcttgatactgctaccactggaacggtcttcgatctcgaaaatcgccgacgggtcagccgagaatttctgcggcacgatcacctgcacaccgtccttatggggctcgatctgcggcgggcggcgtgtggcggatagtttgcgcacgacacaggcagcatattcctgcggcttcttcccggaaatgaccgccagggtcggcggggtctgcttgatatctgcaaccgaagcacacccaccaatcgccaaggccagaaccaacacactccacttcatacaaaacctccgataaagatcctacgacagcggggatggtatttttctcccgcccacgtaggatttatccctgataactcggtaaataactgttttaaattgtcgacgtcgttgaagacgggccgataataaacgcgctggggctgataaactccatcttaacctacgtatcgttctgatttttcagaaaaagcccttctggagacaccccccatgaaattcatccaccagcgcgagcacctcaacgagggagacattgttgtcatcgaatgctcgcagacttgtaatatccgtctgatgagcgatgcgaattttcgcagctttaagaatggcggccgtcacacttaccacggtggcgcattcgacaagttccccgccaaaatcaccgcaccgagcactgggttctggaacatcaccctggacgtggtcacgcgccgagccatcagcgtgacccgcaaacctgcgctgtcccacaagatccgcattgtgcgccgtaccagctccaagctgagctgacccgaacaccccacaggacatgaccgtgaccgccactaccaaatacgtgatcaagtacaagctcaatggcgaacgccgctttgagttcgcacaactgcagaccaacagcgtcgaagaagccaagcaagcgctggcgaaaattcacgatgccagtgatgaaatcaccgatatcaatgtgagcaaggcgctgtaagccgatgtccggccccaccgaagatctgttcgccgacgacgccttgcagcaacccgccgggcgcgagcaaattggcgaacagtcctgtgtattgaaaggctacgccctgccctggattgagcgccttctaccggaactgcggcgggtgctggctcagtcaccgtttcggcaaatggtcacaccgggtggttttaccatgtcggcggcattgagcagttgcggcaagttgggctggactaccgacacctccggttaccgttactcacccgtggacccacgtagccagcaaccctggccgcagatgccggataccctgcgccaattggccgtgcaggcggctgcagaggccggtttccctgactttgccccggacgcctgcctgatcaaccgctatgtacccggcgcaaaaatgtcgctgcatcaagacaagaatgagcgtcgctacagcgaaccggtggtgtccgtctcgctcggcctgccggcgatttttctgtttggtgggcacgcgcgtaacgacaagacccgcaaagtctcgctgttccatggcgacgtggtggtctggggcggcgtggaccgcctgcgctttcatggtgtgatgccgatcaaggaaggcatgcacccggtaatgggtgcgcaacgcatcaacctgacctttcgcaccgccggctgatttgaccgcaagcttcagagtgccaggtgttcgcgacccggctaatctggccgggatccgtcaagagtgcccaccatgactaccgaacaagacccgcgctgggcagccatactggcccgcgaccccaaggccgatgcgctgttcgtctacggcgtgaagaccaccggcgtgtactgccgcgccagtagcgcgtcacgcttgccacgtccggaaaacatcgagttcttcgacaccccggcgaaggccgaagccgccggttatcgcgccagcaaacgcgcggccggcgaccagacccagctcgcagcgcagcatgcacaactggtggccgacgcttgtcggcatatcgaacaggccgacaccccgcccagcctgaacacgttggcgcagcacgccaacctcagcccttttcattttcaccgcgtgttcaaagccgttaccggcctgacacccaagggctatgccagcgcccatcgctcgcgcaaggtgcgcgacggtctcaagggcgcgcactcggtgacggatgccctgtatgacgcaggcttcaactccaacagtcgcttttatgagtccgctgaccaactgcttggcatgaagcccagcgactacaaggccggcggcaccaatacggcgatcctgttcgccgtcgggcagtgctcactgggagcgatcctggtggcgcagagcgctcgcggcgtctgcgcgattctgctggggaatgatccggaccaactggtgcgcgatctacaggatcaatttcccaacgccgaactggtgggcgccgacccgggtttcgagcaattgattgcgcaggtcgtagggtttgtcgaagcgcccgcacttggcctggacctgccgctggacctgcgcggcacggcattccaggagcgggtatggcaagccttgcgcgagattccagcgggcagcaccgccagctacgcacagatcgccgagcgtatcggcgcaccgaagtcgttccgtgcggtggcccaggcctgtggcgccaacagcctggcagtggccattccttgccaccgcgtggtgcgcagtaatggccagctgtcgggctaccgctggggcgtggaacgcaagcagcagctactcgcccgagaacaggcgtcgaagacctagcggatcccgatgtggatcaacgccaggtcgtccgcctggtaagcctcgaaatcagtgacaaaggcacggacctgcgcgccaggctgctggaagtaggtccagatctgttgccaggcgttgatgatcgcctccggcatggggcctcgggcttcgaacaccaggtagcgtccggcttctattacaaggctttcaaacccgtccgccggcccagcggtggcaacacccgctgttacgtcaaattcgccatgcgcgtccgactcatagccgctgtacaccccataaatgggtgactcaggcagttttcccgggatgccctcgtacagtccctcactgaaaaatcgctgccacatcgggccgatcttcgcacttgacggtgtcatctcatccgcgttgcgcgtgcgtattttcaagcccgagacgcggattgccgcgatgtgttgctcctgaatgttgtgcaaagccatctcctttaaagcttcagtttgcgtttacgaaattcagcgaccttatgccgattgccacataacgccatgctgcaccaacggcgcttgtgggccttggtgcgatcataaaaccacaagatgcattccggatgctcgcagcgccggatcagattgaaatccccttccaccaacagcgtggcggccgcctcggcaatcggcgccaggaactgttccgccgtctgctgcttgcgctggcgctcaagcgttggcgtctcgccagcacgccacaccagctgcggatggctcactgccttgcgtaaaaagctgttcagcgccgccggattgccgggttgttgcgccttgcgtgcagccaccaattcacgaatcacctcgcgcagctctcgcgcggcgctgagcaaggcgcccggttcaaacaacgggatgccgttctgttcaacccactgcaggcgcaccagccaggcggctacgtcggcatcggtctgccagaaatcccacggcacgccgtcgatattcgcaagagtgttgagcatgtccagcaccggatcgtcggccaggacgtaaggttccgagggggcggcagtgggtggggaaagggtcatggggcaatcctctagtgagcggccacatcgtaaccgctgtttcgacaccaggatagttacaaaaagcacaacgctaacctgaataaatagtttgacaggttacaatattcggcgcagctttttaaaacggtaacccgtaaatcacctcaatcaagttacaaaaggctctccatcatgaccactccaacccctgtcgttcactaccgccacgtcgatgccgatggtgtgcgcatgttctaccgcgaagccggcgctgcaacggcaccggtcatcttgctgctgcacggctttcccagttcgtcgcacatgtaccgcgacctgatccccctgctcgccacgcgcttccgggtcattgcgccggacctgccaggctttggtttcaccgaggtgccggccgagcgcgattacgcctacagcttcgacaacctggcaatcacggtcgggcattttgtcgatgcactgcagttgacccgctacgccctgtatgtcttcgactatggtgcgccggtggggctgcgcctggccgtggcgcatccggaacgggtcagcgcgctggtgtcgcagaacggtaacgcctacctggaaggtctgggtgatgcctgggcgcccattcgcacctattgggccgagccgagccaggccaaccgcgaggtgatccgcaacgcagtgatcagcctggaaggcacgcgctaccagtacctgcacggcgtaaagcagccagagcgagtagccccggaatcctacatgctcgatgtactgctcatgcagcgccccggcaatgacgagatccaactggacctgttcctcgactatcgcaacaaccttgcgctttacccggcgttccaggcgttcttcaaggccacgcacgtaccgacgctggtgatctggggccagaacgacccgttctttatcccgccaggcgcccatgcctatacaaccgacaacccgaacgcggtggtagaactgctcgacaccggccacttcgccctggaaacccatgcaacccatatcgccgaacgcattcacgccgtgctgggcgacgccatcgattgatgatgcaccacgaaacgacgcgttcgtccagtgaataaaacagagtggccggggggcatgggccctgctaaaacagcgaaaagcctcactaacgctggagacgcatcccatgagcacctggccagacacccgccttctcgacctgctgggcattgaattgcccatcatccaggctcccatggcggtgggcacgaccaccgccatggtcatcgccgccaaccaggcgggtgcgctgggctcattgccggcagctgcactgagtatcgagcaattgcgcgatgcactgaccgccatccgccaggccagcccgcgtccgatcaacgtcaatttcttctgccaccaaccgcccgcgccagaccctgagcgtgatcgtcgttggaaggcactgctggagccctactaccgcgaactgggcgccgactttgatgcgccaaccccggtttccaatcgcgaaccgttcaatgacgcggcgtgccaggtcgtcgaagaattgcgccccgaggtggtcagctttcactttggcctgccggaaaagtccctgctggaccgggttaaagccaccggtgccaaagtgctgtcctcggcgaccactgttgaggaagccatctggctggaacagcacggttgcgatgcgatcatcgccatgggcagtgaagccggcggacaccgtggtttgttcctcagtgatgacctcaatacccagatcggcctgttcgcgctgttgccgcaagtcgtcgacgccgtcagcgtgccggtgattgccgccggcggcatcggtgatgcgcgggggattgtcgcggcctttgcgcttggcgcctcggcggtgcagattggcacggcgtatctgtttactcccgaagccaacgtcacggcttcacatcactatgcattgcgccatgcccaggccagcgaaaccgcgctgaccaatctgttcaccggtcgcccggcacggggcatcgtcaaccgggtgatgcgcgagttgggcgcgatcaacccggccgcaccggcgttccccacctccggcggtgcgctgataccgctcaaggccaaggatgaagcgggcttcagcaacctatggtccggccaggcactgcgcctgggcaaagacaccacgacctatgaactgacccgcgaattggcggagcaaacgctacagcgccttgcccgcttcggccgctaggccagcaccgcgtcaaccggctcgaacccactgagccggctttcgtgggccgggctcagcaccgcaaaacggttctggcgcagtgcgctgatgccatacaccacccgcgcaaagtgctcgttgtcatgggcatagggctggctgcgcaggatcagggcaaaaaagcactcgggctgacgagcaaggtccgcgccgcgaatggacgccagccctgtggcgaacaacgcgcggccactggcggctgacaagcgcccgtaactcaccgaacgggaatgatgaaaggcaagctcggcgtccgtcttggcctgctcgtacaacaggtccattgcttctatcgcgaaaagactgacggaggccttgtcgccagtgacataccgctgcacaagttggcgcacgccttcgcgccacgtgtcatcttcctgctcggcgcgcatggcgatccaatcaatgcagtccactaacgcgtcaccgcctgcggtgaggttcgccggcaatcctgattgcagcttttccaggtgcatcagcgcgtgttgcaccatggcagcttctgcgctcatgacctcgctcatcaggtcgagaatctccggcttcggctccccttgccaggtttgcaggaggcccaacagttgcgccctgaggtcgcgaacggcttcgacgccaagggtacggcgcaacaactcctccgactcgttcaccaggctggtaaggttactgacctggctcaacaggtcagcctggctgaacgaatggagcgtttcacgcccgggggcggaggcatcgaacgggctggggccgaactggtggaacacctcgttccacaaccgctggatctgccggtggatctgttccgtataacgcgacggcaagttgatcacgctgcaactgccttcgttgaaaaaccctgcccaactgatgcccagtgcgaagacgccatcgacctcatgactggcgtgtgccatcgactcatagaacttgtagcagaccactttattctgcaatccaggcagcgccttgaggtactgctcccaactacccagcgtgccgaaatagatgcgcttgtcggcgtccggatcaaggtggctgagggcgctgtccatgatggcggtatcaccctcgtgacgcaggcagagtgcaaagtgctgttgcggttggctgtcgtgcaggtcggaaaacaccagcacaccaatgccctggacctcccaaccattcttcagcaggtgttcggcgcaacggctggcctcggtataaccacaggtggtggaaacctcacggtagcccgtcagctcggccaactcattgtcactgcgcaaagtcttgcgcaaacgctcacgcatcgctgccagccaggtgggcgtaagcaggaacacaccctggctgtcgtcattgagcgctacgcttaccggtgtctcggcgggcagcggtacgttgagcacgggcacggcaaacttggcggccagggttgactgcttgagcaggacacgcagcttgcggctggcgatagtcacgtccacccccagatcgaccaagccgagcagtacccccaatttgcactcatggatgtaggccgcgtactcctccgggcgatcactgttctgcgccagtgcatagtcaaagctcacgtcgctgatgttggcgacgaaccggatcatccctgacagtaacagcgcgcccaatccaccggtggggccaatggacgcgatgaccaatgccgacaccacccgcacaaggcttttgaacatgcctgttttcgcgcggcgccgctcttcgtcggaagaaaatacggcgtagtccatctgctgtttgatttccgcgatggccgcctggcgtaactcgagcgcaaggtcttcggtggttcgaaacgtaatcggttgcggtggaaaacgccggtagtgatagccgtagcgttttttccgggggtggaaatccttgcgcgtcaggctgaatttatccaccggcggcaagtgcgcaccgatgaaggtcatcagcttctcactgggctgacctggcgccgtgctgggctgccactcaacccacttggggcctgcgatgttaagcgataccagcaacgctttgttggacgaaaacgccacgaccaaggcgttcggtaccaccttctccttgaacagcaacgcctgtggcttgaggtcgcccttcaggtatcgaaaggcgactgcgcgcaattcaacatcctgctcttgggtatccgccataaactggccaactcgcacccgggcaacggcgtcgcaggtgtcatcgaacaacttcttgaagtccgcgctattggaaaggctgtcgacatcggccaggaattccgcgaccagggtatccctcaaaccggacaccgctttgatttctgagggtgacagcggctcgccgtccaagtgtatttcgccgactttttcccggtaaaacgcactgcgctgtggctcgccgatcatcacctgggcgaaggaaaaatatttgtagcgcggtggactgtaggccgacatgcccgacgaatgcatggggtaacccaccaggtacttgtagcgaaaacgtttaccggtctctatccgctcggtagttccgttcggcaggccggtcttggccaggcaccgtttgactagcgattgaatgtaggtcttggtgagctgggcgttgcccacgcttcgggccaagccatcccacttctgccaggctctgggagctctcggcagttgatcgacgggcggaaggcgttgtggccattgtgtagtgtcccgggcgacgatctgtacagtaatcaatgcctgcgccgcatcatttcgcacataccagcggttttcctgatcgctgctgaccgagatcaattggtcgtcggccagcacgccacagttgacccattggcagcgatgattcatgtagacgctcaagtaatagccccatttggctcgcgaccaataggcctgcgggatattgacggtgtaggtctgttccgcaggtgttcctggcagtcgccgtagggtcacgaccacgcattgatcgacgccgatatcgatgtcgggcagcaccactgaaccggagacccagcggggcagaatcataaagtcgacatcggcgacgggctcgtcgaagggtacgagccaaacctggttctttgtcgggtccctggaatagtcgatgtagtcccccgaccgcgcgccaatccgcaaaccgggccacgcggtactgattgccttgggccaatcctttaacgacaacgcgatcaacggcacatcgaaccagatcttcgccagcaaccggttggtggtactccagacactgcacagcactacttcggtcttcaccaggttcctctcgggcaacaccagggtataggacgtgccggtggtaaccctggattgactggcggtacggatgctgtcgagaaagaatcgggtgaacgtcagttgctcggcgacggccccgtaatagcgtggcatccggggttcaacccgtaccgagcttttttgccatttgccaacgaaattcttccagtcataacgatcattaagcaagtgccacaacggcacttcctcccaggcctcaataatcggcgcttggtcggtgtcgtcagggtcggcgtagaccgagaacttcaccggcaccctggaagtggtcttgatcagcgccttggcctctggcgccagcctggaccgttgcaggacacggtcatcgatccagtgctgtatctggctctcggacgaggcaaggctggtcgccccgacgctcacataggcgtagcttttctccatgggttgttccttcccgaaagcgcctcactatccttgcatcggctgcccatggatgtaggccgcccatcgagtgatgcagagaaatctcggcgcatcgacgacggctttttttctgcttgccatttattcgctatatacctatacatacagcgttttgcagccctccagcacttctccaactacacaggcatcggagccgcatatgactttcagcaccaccccgcgtttagtatcgacctgcctggcgacgtggatcgccctgatggccaccgccgcccacgccgatgaagtccaggtggccgtggccgccaacttcaccgcgccgatccaggcgattgccgccgacttcgaaaaagacaccgggcataagctggtcgcggcctacggtgctaccggccagttctacacccagatcaagaacggcgcgccattcgaagtgttcctgagcgccgacgacaccaccccgcagaagcttgaaagcgaaggcgacaccgtcaagggttcgcgcttcacctacgccgtcggcaccctggcactgtggtcggcgaaggacggttacgtcgacgccaaaggcgacgtgctgaagaaaaacgacttcaagcacctgtcgattgccaacccgaaagccgcaccctatggcctggccgccacccaggtattggccagggaaggtctgaccgacaaggtcaaggacaagctcgtcgaaggccagaacatcacccaggcctatcagttcgtgtccaccggcaacgccgagctgggctttgtggccttgtcgcagatctacaaagacggcaaagtcaccagcggttcggcgtggatcgttccggcgtccatgcacgacccgatcaaacaggacgcggtgatcctcaacaagggcaaagacagcgccgctgccaaggcactggtcgaatacctcaaggggcctaaagccgctgccgtcatcaagtcctatggttacgagctggccaagtaaatgccgttatcgagtgccgatttttccgctatctggttgaccatcaaactggcctcactgaccaccgtgatcctgctggtcatcggcactccgattgccttgtggctgtcgcgcacccgttcctggtggcgcggccccatcggcgcggtcgtcgccttgccgttggtgttgccacccacggtgatcggtttttacctgttgttgaccatgggccccaatggctacttcggccagttcacccaatggttgggcctgggcaccctcaccttcagcttcgccgggctggtgattggctcggtgatctattccatgccgtttgtggtgcaaccgttgcaaaacgccttctccgccatcggcacacgcccgctggaagtggccgcgaccttgcgcgccaatccttgggacaccttcttcacggtgattttgcccctggcccggcccggctttatcaccgcctcgatcctgggctttgcgcacaccgtcggcgaattcggcgtggtgctgatgatcggcggcaatatcccggacaagacccgcgtggtctccgtgcagatctacgaccatgtggaagccatggaatatgcccaggcccattggttggccgggtccatggtggtgttcgcgttcctggtgttgctggcgctctactccagccgtaaaaccaggatgggctggagctgatgtcgatgatcaatgtacgccttaacctcaagtacgcaggttttgccctcgacgtggacctgcacctgcccggccgtggcgtgaccgcgctgtatgggcattccggttccggcaagaccacctgcctgcgttgcatcgccgggctggagcgcgccgaagacggcttcatccagatcaatgatgaagtctggcaagacagtcgtaacgggctgttcgtgccgccgcataagcgtgcgctgggctacgtgtttcaggaggccagcctgttcccgcacctgtcagtgcgcgccaacctggagttcggcctcaagcgcatcccgcgccaacagcgccgggtggatatggcccaggccactgagttgctgggcatcggccatctgcttgagcgccacccccagcacctctccggcggcgagcgccagcgcattggtatcgcccgcgccttgctcaccagcccgagcctgctgctgatggacgagccgctggctgccctcgacagccagcgcaagggtgaaatcctgccgtacctcgaacgcctgcacgatgaactggatatcccggtgctgtacgtcagccatgcgcaggatgaagtggcacgcctggccgatcacatcgtactgctcagcgacggcaaggccctggccagcggccccatcggtgaaacgttggcgcggctcgacctgcccctggcgcggggtgacgatgcaggtgtggtcatcaacggcacggtcaacgcctacgacgaccactaccaattgctcacgctgcaactgcccgccagcgccctgcacatgcgcgtggcccacgcaccgctggcgttgggcaaggcgctgcgcatcaaggtgcaggcgcgggacgtgagcctcagcctgcaagccgaggagcacagcagtatcctcaaccgcctgccagtcaccgtcacccaggaaattgccgcggacaacagcgcccacgtgctggtgcgcttggacgcaggaggcacgccgttgctggcgcgcatcacgcgattctcccgcgaccagttgcaactgcaccccggccaggcgctgtgggcgcagatcaaggcggtcgccgtgctggcttgagcaatcttttggcacgaccgcatacggctgcggtcaatcagacataccggcctgatgtgttgccaaggaacccgccccatgtccgattctgcgctgccccgcgacctgcattacgttgacgacacccagcccggcatccgtcgcaagacgctgcggggcaagttccagtacttcgaccccaagggcgagcgcatccgcgatgccgacgagatcaagcgcctgaatgccctcgccgtaccgccggcctacaccgatgtgtggatctgcgccgacccgcaaggtcatctgcaagccactggccgcgatgcacgtgggcgcaagcagtaccgctatcacccgcgctggcgtgaggtgcgcgacagcgacaaatactcgcgcctgcaggaattcggcaacgccttgccgaagctgcgtaagcagttggaagcgcaaatcgccgaacccggcttcacccgcgaaaaagtcctggccacggtcgtcatgctgctggacgccacgctgattcgggtcggcaatacccagtatgcgcgggacaacaaatcctacgggctgaccaccctgcgcacccgccatgtggacgtcaaaggcagcgagatccagttccagtttcgcggcaagagcggcgtcgagcatcagatcagcgtcaaggatcggcgcctggccacggtggtcaagcgctgtatggagctgccgggacagaacctgttccagtacctggacgaagacggtgagcggcacaccgtcagttcccaggacgtcaatgactacctgcatcgcctgaccggtgcggacttcaccgccaaggactaccgcacctgggccggcaccgccatggcgctggcggtgttgcgcgagctggaatggcagcctgagtcggatgccaagcggcatgtggtggcgatggtcaaggatgtcgccaggcaactgggcaacaccccggcggtgtgccgcaagtgttacatccaccccgccgtgctggagcatttcagcctcggtgaactctccaaattgcccaagccgaggctgcgcaaagggctcaaggccgaagaagtggcgttggcgatgttccttgagcaactggcggcggacttgccgaaaaaagccaaggcgggttaggctctgcctcccttctgatacgcaggacgaccgccgacgtgaaccactaagccttccaaaatgtatctgcaacgagccgcctggcgcgcttgttggcctgtccgacatttttttggaggtgctgatgactgacgtcaaccggctgcccgtgcttgtttccctgcaacacttatccttccagttcgccaatggcgacacgctgctggatgacctgaacctgtccatcgattacacccccaccggcatcgtggggcgcaatggtcgaggtaaaagcgtactcgccaaattgatcgcggggctgctgtcgccctcctccggctcgttgaactgcccgaacagcgtgatctatgtcgcgcagaacgtcgtggtagcaccaggcgataccgtcgccgatcttaccggcacggctgcgatattgaccgcccttgagcgtatggccgcaggcgccgcacagatcgatgaccttgaattgattgatgatcgctgggacttggccgagcgcttgcgtagtcgcttggataccgcagggttgtcgcggctttctgttgatacccccacccgtcaactcagcggaggccagttggccagggtcgccgtcatcggcgcgctgctagccgcgccacagttgctggtgctcgatgagcccaccaaccacctcgacagcgatggccgcgcctggctgctgcgtgtcctcgacgaatggcgtggcggcctggtggtggtcagccatgatcggcaattactcaacgccatggggcgcatcattgaactgtcgccgctcggcgtaaacgtatatggcggcaactacgacgcctatcgacaacagcgcgaggctgaacaacacgccgccgtcgccgcgctggaacacgcccgcctggaacgcagccgcgaaaaacggcgcctgcaaaaagaccacgacaacctgcaacgccatgccgcccgctcacgcaaacatgcggaaacggccaacgtcgatcgcttcaccaaagcgcgctggaaaggcgccgccacgcaaatcctcaacaccgtacgcagcgcgcatgagcaacacaaacaggagctggatacccaggtgggccaagcctatgcacgggtcgaggatgaaacaccgacgctgttggcattgcctgcttcagcggtgcccaacgggcgacaggtgctgtcgttgatcgacgcgcaattaccctggctgccgtcgacctgcctcaacgtccacctcgtcggcccggtgcgggtggctgtgcatgggcccaacggttgcggcaaatccacgctgctcaaagtgttggcgggagaatggcgtgcagaacgcggcgaatgccacgtgcacgtacccagcgcctacatcgatcagcacatcgcgctgctcgacgaccatcgctccatcgtcgaacaactgaacctgctggacaccccgctggcggagggtgaattgcgcacgcgcctggccctgctgcaactggatgccctgcgtgtgacccaacccgccgggcaactcagcggcggcgaacgcttgaaggctgcgatggcggttgccttgtggcgcgcagtgccggcgcaattgctgttgctggacgagccgaccaaccatttggacctggaatcggtgatggcgtttgagcaagccatgcaaggttttgccggggcaatgctggtggtgtcccatgacgcggcgcttgtgcaggcgatcaggccgacgcactttctgaattggcatcctgcgggttggaccctgacgcctgcctgaggtcattgcatgcgcgcttaaagcgtcctacggtagtggccggataatctcaccgaggaacccggccctatgttgccttcgccacgaaagccctacgtcaatgccgcactggcccatcgacaacgttggcgtggccgcgtcggactgatgctggtggccagcctgtcggtgctggcgggcatgaccgatgccatcggcttcatggcgagcggtgactttgtttcgttcatgagcgggaacactacgcgcctggcggtggcgataagcgcgggtgacctgggcctgaccgggcggctgctgttgctggtggcgacctttgtggtgggtaacgcgctgggcgtggtggtcagccgactcagccgtcgccatgccctgcccttactgctgtgtattgccgccttgctgtgcggcggtgcactgctgcccttcgccgataccttgcccgcgctgctggcggcgatcatcgcaatgggcatgctcaatgctgcggtggaagaggtcaacgggctgccggtgggtctgacttacgtcaccggcgcactgtcacgctttggccgtgggctggggcgctggctgctcggcgagcgccgcaatggctggcgcgtgcagttgatcccttgggccgggatgttcgtgggggcagtaatcggtgcgctgctggagcagcaactggggctcaaggcgctgatcgtcagcggtggattggcggggttgctggggctggtatcgctgaagatccctcggcgctggcacctgggtttcatgccgcgctgagggctaaaaaggagctcgcccgacgtttaggcctcgacgtccgtgtactggtaaagagccatcatgtcgggcgagcgggtgaatcataagcgaatgccttgcggctgtcgtgccaggcatttcctaaatcgactaaggcaacggattacaggcaggtcgccagtgcggccaaacgacgcttggccggcatattgtcttcgatggcgtagtacttgatggtggaaccgctgcccgcgctctgcacatcgacaaagtaatcgccggcggtggtgtacaccgtgaagccacccgcgccgattggctccttgaagccgccggcgtcaacgccgaacacactttcgtcctgccagccgaactgtacgcactcggcaacgaccagggtggccttgtccgaagccagggtcttgtaaggcgtgcctgcgcgcgcctctttcatcttcgaacccgcgcaaccggccagggccgccagtaccagtgcgccaattaccaccttgtgcatgccattgctccgttggaaaaaaacgcgactgtaccattgccactggccggactgatggccgcatgaactttgtttcactgtaaaggggcaaggcgcgacctatagtggtcacgctcatttttagaagtctcccttcggcccgctctcccgcgggctttttttcgtcccggttgtgctcagagcagccagcggaacagatagaacaacgccatgctcagcagcaccgtcatcagcacattgcgcgtccagaacatcaacgccacggcgctgatacccgccagcaggtaagggttggccgggctcaggttgagctggtggtcggccaggaaaatgatcggcccgcaaatcgccgtgagcatgcccggcaccgcgaatcccaaaaactcgcgcgcgccacggttaaggcgcaccggcaggcgtggctcgataaacaggtaacggttgagaaacaccaccaggcccatggccacaatcatgatgtagatcattgctgccccactcccagtcgcttgcaggcataccctgcgctcatgcccagcaggccggacaccaccaccgccgactcccaatgcaggaaactcagccacaccgagaacaacaacgacaccgccacacagaccaccgtaggaatgtcacgcaccaccggcgtaatcaacgcaatgaaggtggcggcgatggagaattccaggcccagctggtcgagaccgggaatgctcttgccgagcacgatgccggccagggtgaacaggttccaggcgatgtagaacgtcaggccgacacccagggcataccagcggttgaaagtctcgcggtcatagtgactgaccagcgcaaagaattcgtcggtcagcagaaagcccaggctcatgcgccagcgagttttaaggggagaaaggaccggccgcaaatgcatgccatacagcaaatgctgggaggtcagcagcaaggtggtcagcacgatggaaatcaggctggcgccgctcttgaccatgccgatggcaaccagttgtgcagcaccggcgaatacgatggcagacaggccttgggcttccaacggagtgaattgcgcatcaatggccatggaaccggccaacagtccccagggcgcgcaggccagggacaaaggaatcacggcgatggcgccgcgagcgaaggcgtaatgaggtaaggcagtaggcatggaaacggctcatcgacagacagtcgacaagcatgccagcgcaacagtggcgttgtcttgaacgatcttgctcaggcgagccgcaccgacacctgctccaccgaatcacgcgcttcgcgcagttcgtgggcatcctggttaagtcggtgaatggtattgagcaggcgctggcgcagcacttcatcgccgagtttctcgacggcgcgcatcaggtcgaacgccgcggtttcgttattttccgcgacggaatccagggtcttgcgcaggttgcgagtggcacgggtcacgcgggttcttccttcatcagcaatgggcaggcactttaggacattcgtgtttcattttaatttcaaacacttgtggtgattttcgagacatatgatccaagtcaattgaaacgggatttgacctacacatatggaaatacgtatattcggataaccatatatacgaaggccttgaccatgtcggacctcatctcgccccccaccctattcaaatgtctggccgatgccacccgggcacgcctgacgttattgatcctgcgcgaaggcgaactttgcgtgtgcgaactgatccatgccttggacgacagccagccaaaaatctcccggcacctggcgcaactgcgcagttgcgggttgctgcaggaccgtcgtcagggtcaatggatctactaccgcatcaatcctgcgctgcccgagtgggtgacgcaggtgctgcacaccaccctgcaagccaaccagccctggttgcacaacgacgcactgcgtctggatgcaatgggcgaccgaccacaacgggccagcagctgctgctgagccatcggagcgtttatccatgcttgtcgccattgcgatttttatcttcaccattgtcctggtcatctggcagcccaagggcctgggcgtcggctggagcgcaaccttgggcgcgatcctggccctggccttcggcgtgatcagcctggctgacattccggtggtgtggcacatcatctggaatgccaccggcacttttgtcgcgctgatcatcatcagcctgctgctggatgaggctgggtttttcgcctggaccgccttgcatgtggcgcgctggggacgcgggcgcggacggcgtttgtttgcctacatggtgctgctcggcgcgctggtgtcggcgctgtttgccaatgacggcgcggcgctgatcttgacacccattgtgatgtcgatgctgctggccctgcgcttctccccggcggcgaccctggcctttgtcatgggcgccggatttatcgccgataccgcgagcctgccgctggtagtgtcgaacctggtgaacatcgtctcggccgactacttcaagatcggtttcaacgaatacgccgccgtgatggcgccggtgaacttcgtcagcgtcgcggccaccctggcggtgctgctgtggttcttccgccgcgatattccacaaacctacgacccggccgacctggaagaccctgccagcgccatccacgaccgcgccaccttccgcgccggctggtgggtgctgggtatcctgttggtggggtgctttgccctggagccgctgggcattccgatcagtgctatttccgccgcctgcgccctgctgttgctggtgatcgccgccaaggggcacaagatttccacgcgcaaagtgctgaaggaagcaccgtggcagatcgtgatcttttccctgggcatgtacctggtggtctacggcctgcgcaacgccggcctcaccacttacctggcgacctggctcgatacgttcgccacctacggcgtgtggggcgcggccatgggcaccggtgtgctgacggcgttgctgtcgtcggcgatgaacaacttgccgaccgtgttgatcggtgcgctgtccatcgagtccagccatgccgtgggcgtggtcaaggacgcgatgatctacgccaacgtgatcggcagcgacctcggcccgaagatcacccctatcggcagcctggccaccttgctgtggctgcacatcctggcgcgcaagggcatcagcatcacctggggctactacttcaaggtcggcatcgtgctgaccctgccggtgttgttgatcaccctcgccgccctcgccctgcgcctgagtttctaacggagataccccgatgaaagtcctgttcatgtgtaccgccaacagctgccgcagcatcctgtccgaagccatattcaaccacctggcgccggaaggcttcgaagcgatcagctcgggcagctttcccaagggccaggtgctgccgcgcagtttgagcacgttgcaggcggcgggcatcagtaccgaggggttgtacagcaagggcaacgacgcctttgaaggcagcccgccggatgtggtgattaccgtgtgcgacaaggccgccggtgaagcctgcccggtgtatttcgggccggcggtgaaggcgcactgggggttggaagacccgtcggacgtccagggtgacgacgccagtgtgcaagcggcattcgacgccacgctgaagaccatcgccacacgttgccgggcgtttttcgtcctgcccttcgacgaactcagccctgccgacctcaaggcggaacttgcgcgtattgcgcagttgtaatcggaggccctatgaccaccctgcccaacctggacctgtccctggtcgactcaaaactcggcggcgcggaccagccgccgcgcatcctgctgctctacggctcgacccgcgaacgctcgttcagccgcctgctggtggaagaagccgcacgcctgttgcagcacttcggcgcacacacccgcatcttcaatcccagtggcctgccgttgcccgatgacgcgcccagcgatcaccccaaggtgcaggaactgctggaactgatgcagtggtccgaaggccaggtgtggtgctcgcccgagcggcatggctcgatgtcggcggtgttcaaggcgcaactggactgggtgcccttgaccctgggcgcggtgcgcccgactcaaggcaagaccctggcggtgatgcaagtgtccggcggctcccagtccttcaacaccgtcaaccaactgcgggtgctggggcgctggatgcgcatgttcaccatccccaaccagtcctcggtgcccaaggccttcatggagttcgatgaacaggaccgcatgaagccctcggcgctttatgatcgggtcgtcgatgtaatggaggaactggtgcgcttcaccctgctgctgcgcgaccgccccgacctggtggaccgttactcggagcgcaaggaaagcgccgatgaactggcgcgccgggtcaatcaacggtcgatttgatccccccggccagcgtatgctcgtgcctgtcccccgactgagtgaaatcgatgagcgccgtgcaacacgcctggctgggcaactatgaagtcagtagcacggcctgcaacgggctgacctttgcccgccatagccatgatgaatgtgtgatcggcgtgaacctggtaggcgaggaaaaagtctggctggatcgtcgcgagttccacgccggccccggtgccatcaccttgtacaatcccggccagattcaaggcggcggtgcggccgatggtgcgccctggcactttgtgagcttgtacgccacggcggaacaattggcggcggacctggggctggtgcacctggaatttgaccgtgctttatgtgttcagcccgagcttgccctgcgactggccgccgcgatcaagggagcgctaagcggtgacgcgctggttcgcgacgtgaatgaagacgccttggtgctgctgttgggtgaagtggtgaacatcagcggggtacgcctgcccggcagcgccaatcccggcaaacccctggtcagccgcgcccaggaattgctcgccgaacacctgcatcaacccctgaccctggaccacctgggcggcgaactggggctgtccaaattccacctgctgcgtgccttccagaaagaaaccgggctgacgccccgggagtgggccatgcagttgcgtacccgtcgcgccaaaggcctgttgcgcaagggcgtccccgctggcgaggcggcccacgacctgggcttcgccgaccagagtcacctgaaccggcatttccgggcggcctacggcatcacccctggccactaccaaagcaccgtaaaacgctgaacagcgcaatctggtccaagacaccgcgcctgcacatcctcacactgccccgcctcacttgaaggaaatgcaggcatgctgacgatctttttttatgcactgatattcggttttgtgttttgcctctcccccggcgccgtgctcgcggagaccctgcgccgtggcttgctgcatggctttacaccagccctgctggtgcagttcggctcactggtgggcgatgccgtgtgggcagtgatcggcctgaccgggatcgccctgctgatccagcatgacgcggtgcgtgtgccgttgacggtggtgtgtgcgttgtacctggcctggctgggcgtacgcagcctggtcgatgcctggcacctgccacaaccggacagcgcgcccgccagcacccggcaaaatgccctggcggtaggcgccgcaatttccctggccaacccgaagaacatcgtctactggggcgcactgggcagtgcgctgtcggggattgtcggcaccacgcccagccacgggcagacgctgatgttctttgccgggttcatgctcgcgtcgatcttgtcatgctttctgattgccgctctggtgaacctgttgcgtcagaacgcctcgcctatttggcagcgcatcagttatgccgcctgtggactggtgctgatctacctggcgctgctggcctggcaaggcctctgatcaggccggccagcggcggtgcaggtcgtcgatcacatacacgtgtcggtgcacaccggctgccgggtggaccaggtgcgggtggccggctggcaggtcagggtgctcatgcagcaccatcgcttgctcatgctccggtcgccacaggctggcgcacgcgatcaatgccagggtggccacaaaggccaggctggcaaacgtctgcgacatgccgaagttggcaccgagccagccggccagcgggtacgtcagcagccagcagatgtgcgacaacgcaaattgcgcggcaaacagcgccggccggtcctcggcatgggcggagcggcgcagcaagcgcccgcccggggtttgcgccagggaatagcccagccccagcacccaccacagcaccagcagttgccggtaatccgatagatacacgcctacactgagccccaggatcagcagcccaccgcccgacagcatggccacacggtcgctgaggcgcgccagcaacctcggcaacaccagcgctgccatcatcgaaccggcgccgaacgcggccagcgcaaacgccgtgaagcgttgcggcaaggcaaacccggcttgcaccagcaccacgctgttgacgatgaccatcgcactggcagccgccaccgccaggttcagtgccagcagaccgcgcaggcgcggcgttgcgaggaatatccgcaggccacgggtggtgcggtcatagataccgcgccgcagcttcacctgggcttgcggcaaaagcaccgacgacaccagcaaggccgaaaccaaaaaacccatcgaggtcccggcgaacaggctgtggaagctgatgacgctcaacagcatcgccgccaggatcgggctggccacactttccaggtcgtaggccagacgcgccagggacagtgccttggtgtactgcgcctcgtcggggaggatgtcggggatggtcgcctggaacgtcggcgtgaacgccgccgacgccgactgcagcacaaaaatcagtagatagacctgccacacctcggtgacgaagggcaacgccagcgcgaccagcgcgcgtgtcaggtccaggcccaccagcatcgccctgcgcggcaagcgctcggcaaaggcggccgccaccggcgcaaccccgatgtaggccagcatcttgatcgccaacgcggtccccaacacggtgccggcctgatcacctgccagctcgaacgccagcagccccagggcgacggtggtcaagccggtgccgatcagggccatcacctgggcgaagaacagccgacggtaggttttgttgccaagtacatcgaacatgggcgccccctggcgtgctgcctataggtatttggtcagttgcttgagctcagccagcgaagcctggccatccagcgtcacactgccttcgaggcaatggtcgatatggtcctggatcagcgtgcgcttggcctggcagaccgccttctccaccgcgtgcagttgctgggcgatatccacgcacgggcgctgcgcctcgatcatgctggtaatgctgcgcaaatgaccttcggcacgcttgaggcgtttgacgatggcttcatgggtttggtggacatgttcgctcattgagaggctccttagacgaagcctgatcgtatcccccccagggaggatgctggcaagcccgctcatctccgtcgtcaaaacaattagctcactgctcacaacgctgacttagtgcaagtaacgttacaaccgaagcagaactgaaacaggccttctatctgaacgaactctgaacttgtaatgaattaatacattaagcgttgacatcctgcatcgccctgagtagattgcccgtgcctgcaactggggccttttttaaacctcacaaaagaagccaatggacacagtatctagtcgctgtccgagcaccgccttggcgggcatcgggcgccaaacccagaacatgacaggactcgcctccccggtccggtaagctgcgctagagcttgatgctccaccgtaactgcctcgccggtcgcccgtccggtcccgaggtgtgttatgaccttgctaacccttgctttgcccgatgtacgcacactcgcggccgccctgcgcgccaagctgtgccgcgagcctgtaggcttttcgcctacccgctctgcctttgctgcaccctcccctcaaatgcgcccggctcacccgctggcgcattggcgtatctgccctgacagcggccaactggtccagcactgggatcacgccgaccctcaagacccacagagacccaaggtttccagcctggcccaggccagcttgatgctcggtctgtatgtgagcgctcgcgccgcctgacccggctggaaacagcaacttcctgattattgttctggagttctttatgaacacgtccagtagtagcccgctgcgcgttagttaattaacgcgctgttagcgggcgctgtagaagttatgtgaacaccttatttaaaccgatcgcgaagttagcgactcggcatgctttcgctcgcctgtcatcaggccggtaacgggtatgttttgtcgaaaaattggcgacaggagcacacaccatgagcgccgtaaaaaacgccccattgaacaaaaagagcagcagccacaccgacaccaaactgtcgatgcgtgccgcccgcgaagcccagaacggactgtcggccaccttggccaacgtccgcgccaccaaagacggcctcaccgagctggacgcccaggcgcgcctgcaacgcgaaggctacaacgaagtggcgcatgacaagccgcgtcacgccatcgtgcagttcctgcaggcactgaacaacccgttcatctatgtactgctgaccctggccggcatcagcttcttcactgactgctggctgccgatgcaggaaggcgaagacgccgacccgaccaaagtcatcatcatcatgaccatggtattgctcagcagcctgctgcgcttctggcaggaacaccgctcggccaaatccgccgaagccctcaaggccatggtccgcaccaccgccaccgtgctgcgccgtgagcaagtcggctcccaaccgaccctgcgcgaagtgccgatgcgcgagctggtggccggcgatatcgtgcagctgtcggccggcgacatgatcccggccgatatccgcctgatcgagtcccgtgacctgttcatcagccaggcggtgctgaccggcgaagccttgccggtcgaaaagtacgacaccctcggcgatgtcacgcagaaatccgccagttccatggccgccgaccagggcaacctgctggacctgcccaacatctgcttcatgggcaccaacgtggtcagcgggcgtgcgcaggctgtcgtcgtggccaccggggcacgcacctactttggctccctggccaaggcgattgtcggctcgcgggtgcaaaccgccttcgaccggggcgtgaacagcgtcagctggttgctgatccgcttcatgctggtgatggtgccgatcgtgttcctgctcaatggcttctccaagggtgactggggcgatgcgttcctgtttgccctggcggttgccgtaggcctcaccccggaaatgctgccgatgatcgtcagcgccaacctggccaagggcgccacggccatggccaagcgcaaagtggtggtcaagcgcctcaacgcgatccagaacttcggctcgatggacgtactgtgcaccgacaagaccggcaccctgacccaggacaagatcatcctcgaacaccacgtcaacgccttcggccaacgtgatgatgcggtgctgtccctggcctggctcaacagccatcaccagagcggcatgaaaaacctgatggaccaggccgtggtggagttctcggaacgtaatccgaagttccaggtgccgtttgcctacagcaaggtcgatgagttgccgttcgacttcgtccgccgtcgcctgtcgatcgtggtcaaggatgctgccgacgatcaactgctggtgtgcaaaggtgccgtggaagagatgctgagcatttccacccatgtgatggaagccggcgctgcggtgccactggatgatcgtcgccgcgaggagttgctggcgattgccaacgactacaacgaagacggtttccgcgtgctggtggtggcgacccgtcacattcctaaatccctggcgcgtcagcaatacaccacggccgatgagcgcaacctggtgatccagggcttcctgaccttcctcgatccaccgaaggaaaccgccggccctgcgattgccgcgctgcaacagattggcgtggctatcaaagtgctcaccggcgacaacgccgtggtcaccagcaagatctgccgccaggtcggcctcgatccaggccagccgctgctgggcaccgaaatcgaagcgatggacgacgcgacactgctgcgccgcgtggaagaacgcacggtatttgccaagctgacaccgctgcagaaatcccgggtgctcaaggcgctgcaagccaacggccacaccgtgggcttcctcggtgacgggatcaacgatgcaccggcgctgcgcgatgccgacgtggggatctcggtcgacaccgccaccgatatcgccaaggaatcagccgacatcatcctgctggaaaagagcctgatggtgctggaagaaggcgtgctcaagggtcgcgagaccttcggcaacatcatgaagtacctgaacatgactgccagctccaacttcggcaacgtgttctcggtgctggtggccagtgcgttcattccgttcctgccgatgctgtcgatccacctgctgctgcagaacctgatgtacgacatctcccagctggcgctgccgtgggacaagatggacaaggaatacctggccaagccgcgcaagtgggatgcgaagaacatcggccgcttcatgatctggatcgggccgacctcgtcgatcttcgacatcaccacgtttgcgctgatgtggtacgtgttcgccgccaacagcgtcgagatgcagaccctgttccagtccggctggtttatcgagggcctgctttcgcaaaccctggtggtgcacatgctgcgtacccgcaagatcccgttcttccagagtaccgccgcgtggccggtgttgatgatgacctgcgtggtgatcgtgctggggatctacgtgccgttctcgccgctgggcaccctggtgggcctgcaaccgctgccgatggcctacttcccatggctggtgggcaccttgctcagctactgctgcgtggcccaactgatgaagacgatctacatccgccgcttcaagcagtggtactgatctctcccgccgtttaaacggtggcggtcgcccggccgccaccgtgcactacaaggaaacaccctatgcgcgtcttgatctgtgcaggtcgtcattacgccgacaccaaaatgtcccgccaggtgctggacgcttaccaccgcctgcgcccggtgcaggtattgatccacggcggcaatcaattcctcggcagtgacgtcgaggaatgggcacgggaactgggcatcgatgtggtgcgctacccgcccaactggcaacgccacggcaaacaggcggaacgccagcgcaaccatttcatgctgaccgacagccgccccgatgtggtcatcgccctgcccggcggggacgacaccagcgagctggtgtgccaggccaaagccagcggcatttcggtactgaccgtagaaagctgaattcatgcgaggtgcatcatgcacaaaaaacacaccccagcccgtcaggacgggtttgccaaataccgtgcgcgtcactaccgcggtgcacgccacacgttactgctgctgccaccggccaaacgccgcgcgttgcagcgcaatttgattttcataggcctgaccctgggcatcctgttggcgattgccttgctgtcaaaagcccacgcggccggcggttcttatatggtcgacgacggtgcgatcaacgcgccaggcgaatgcaacgtcgacgcctggtacaccgccaaccgccacgacggcagtacccacacagaaacgctgtcaccggcctgcaccttcgccgcgctgccttcggtgcaatggggcgcggccctgtcgcgtgcaaccagcacagacaagggcgaaacccaggtgaacccgcagctaaaggcccaggtgtggtcgcgggaggatctgggcctggaactggccctgtccgccggcgcgcactttgccctggatcgtcatcacgggtttgatggcgcggacttcaatattccgttgacctggcaaccgctgacacccctgcggctgaacctgaatgccggctggtcccatgcctacaacgatggtgaccagaaacaccgcctgacctggggcaccggttttgaataccaggtggcgccgttgctgacgctgatcgccgaacgctacggccaggaaggcggcgaccaggcctggcaggccgggccccggttgcatttgggcgaattcgtcgacgtggacctggtggtcggccgcagcctgatcggtgatcgggcacagtggttgaccaccggcgccacgctgcgtttctaggccttggcttgttgttccaggtgcagttgcaattgcgggtcgatttgcaactgccctgccaggtcgtccaggtaattgcgttcggcgtcctgctgatcgtccaccagcatcacactggccaggtacacctcggccgccacggccgggtcgctggcaaactcggcgaaatccgcggcatccagcggcttggccacttcggcgtcgagccactcttgcagttgcgggtcgtcggtatgccggcccagctcattggagatcaactgctgctcttgctcatcgatgcgcccgtctgccttggccgccgcgatcaaggcacgcagtaccgcgtggctatgggcttcggcggcggagccgtcgagctggtccaccgtctggaaggcttgctgcggcgcgctggcctgctggcgttgccaggcttgataggcctggaatgcggccatgcccagggaggccagtgccgcgtagttcatcccgccggagcgcccttgggcaggacgagcgcccgtcgcaccgcccagcatgccgccaaggccacccaatagatcacccaggccgccaccggttgaagcattaccggtgctggtgcctttcaataaaccgcccaatagcccaccgaggccaccgcccgaagaagcactgccaccttgcccggcgcgcaagagttgttccagtaagtcgctggtgttcatggtgctaccctcccagggcgcagtgttggcgtttaacaaacatagcccggccttgccggaacaccatgaccgccgggcgggcgcgacttatcattgcgtcaccgcgccttcgagagaacagccacgtgaaccggattgaacacatcgcattgatggccaactacaaccagtggatgaaccgcaagctctacgacgcggccaacacgttgtcggacgcgcagttgtcgacggatcgccaggcgtttttcggctcgatcctcggcacgctgaaccatgtggcgctgggcgacaccgtgtggctcaagcgctttgccgggcatcccgccgggtacacagcgctggcgccgctggaggcgattgccgcaccgctcgacctgaggcagttggcatttgccgatatccgcgaactggccacccaccgcgcctggctggaccaactgatcatcgactgggcccacaccgtgcgcgagcccgacctggatcagcgcctgcactacagcaacatgcgcggcgtcgcagccgacaaaccgttcttcggcctgctggtgcacttcttcaatcaccagacccatcatcgcggccaggccaccaccctgctgagccaggtggggctggatgtgggcactacggatttgctggcgctgatcgaatgaactcggcgtacgcctgcagcaagcgcggaaattcctgaggttcgggcaattgcgcaaagctttcaacggcgggcgtggacacccagggcaatttttcgcgggtccaggtttccatgaaaggtacgtaatcgccggcgttatccagcaacgtcgcacgcacgttgacgaactcatcgatgccatggggacgggtgaacagccagctcatgcagtgcgggcaaaagtaatgccggtccacgccctgcaggccgccgatcaccgggcagccctgggtcaccgtaaaaccgctggcgggaatcaacgcgctcaaggagaacgcgctggaggacatcttctggcaaccggtgcagtgacaggccatggtgatcactggggcagcactcacgctgaaacgtacacgttcacaacggcagctaccctcttgcggcagggtgtcggcactcatcatcacttcctttcatggatggggtgggtggcaggttaacgtccgacctcgaccttgaacaggccatacacccaaccgaacgctgagctgcacctggggtcgtaaccttaggtgccggggttttactaccccgccctccccgcgtgcatcgtgggtctaccgatgcgcgtacccccaagaaggagacgcttacatggtcattcacttcaaggtcgccggccacctcgcctgtggtcaccacggcaacaacctgccttccagcaacgagctgaaccgggtcaaatgccgtacctgccgcaataccgaagcctacaaggaagcgcgccgcacccagcgcaatgccgcccgccgtgccaatcgcaaggccaagagccacaccgccgtcgactggcgcagtgcatggacacaacggttgacggacttgccagggttgcagcgtttgccacggggatttagtggtcagccgtttgtataagccgcacatgcaaaaaagccccggatgatccggggctttttttgttcttaaaaaagataagggcctgcgtcaggtttccccggcaagcccttgatatctatggtgcccgaacccggaatcgaaccgggacgcccttacgagcgggggattttaagtcccatgcgtctaccagtttcgccattcgggcggcagcgcgtgttgcagggttgggaatatatagatcccttcgcctcgatgcaaggtcgcaagacagctttatcgcacaactggacgggtgaaaaaagcttgttagatcagtgatctagattagcttttggaagccagtccaagagacctgttgctcggcaacccgccagctctggtactgtgacgcccccaacggaatggacacatcgcagaatggactcacgcaaggtatttacaatcattgccctggcagtgctcggcaactcagccgtggccgccgagaacaacaacccgtttcaggccgcgctgatgctcacgtcggtcgctccgtttgtgctgacctccggcgccctggcgttaacctccgctattcctgacctgttcaaatcctccaaaagcgatgcacttgcgtatatcggctcagggggagagatccgtggggcgcagtttgaacaggcatcgcgctactaccgttcaaactacactgcccccctaatgtctgacatgcagttggcccaggccattgccacgactctctgacccttcagcccaacaaggaagtcatcgctgatgcacaagtcccctacctggctacacacaaccctgtcgataccggtctacgcgactgcggtcgtgttttggatgttgaccgtctacctgatcgtcactgcgtcggtgaagatgctttcccgatttgtgacgcccgagcagattggcgaaggggtggccaacttgctcgtagccgttgccctggccgcattgggtagtggcctgtggaaactggccaggtatgtccggacgtcatccttcaaaaagccggcgaaggcgactttgacgtaactattctgtaacagacgcagcgtctggcgctggcttcttgagcgccagcgctggatcgggcacctcgacccagcccttcttcagatactcacctgccacgattttacgtatcaggaaacagtagatgatgggcaatactgcaatcggtatcgccgcccagggcgggcctgccaagaggcccagtccgagggcggccccccagatcagcaagtggcgccaaaggcccgcgaagagcaggtagagagggccgagaaacagtacggccaggacctgaaaggcgtcgacctcttcaacctggtcactgtccggatgtttgaaatagcgggtcattgcactgtccttgtggggtgagaagcccgaagaatctaacactggagaccttgtattcctactgaaccatcagcctttcctgacgagcctgcgggtcgctgcccattgatgttgaagccgactatgctaaggcgatgtgcctgatccgagacgtcaggctcgcccgcctctggttccccagcggctggtagcggaatacccgcagtgatcccccctatcggagacccgagatgaatcccaacgccaccgcccttgtcctgatcgaattccagaacgacttcaccaccccgggtggtgtgttccatgacgcggtcaaagacgtgatgcatcagtccgacatgctggccaacaccgccaccaccgtgcaacaagcgcgcacactgggcgtaaagatcattcacctgcccatccagttcgccgaaggctatccggagctggcattgcgcgactatgggattctcaaaggtgtagccgacggcagcgcgtttcgtaccggcagttggggggccgagatcagcgagtcgattacccgtgaacccggggatattctcgtggaaggcaagcgcgggctggatggttttgccaccacgggcctggacctggtgctgcgcaacaatggtgtccagaacctggtggtggccgggttcctgaccaattgctgcgtcgagggcacggtgcggtcaggttatgagaagggttacaacgtggtgaccttgagcgactgcaccgccaccttcaccgacgaacaacaaaaggccgtcgaaaacttcacgctgccgatgttttcgaaggtgttgcgccataccgagtttcttggggcgttgagcgcccagtaagaaaaaagggagcgactgatcactcagtcgctcccttttatttcatccgtcgagtggttttatccgttgagcgtcaaccccggataagcccgcaccggcaccttgtgccgctgcggttgctgccgggcaagctgcgcctggacctgcgcaaccgcatccagcacgcgttgcgcccactgctcgtcttccgggtcgacgactaccacgcgaaaaccatggtcgacgccttcaagctgcacgccctcggaatcatcgacatgcaagtcgatatcgaaggccggcgggaatttcgacggtgtgctcgtcagcccacgctcggtgagagcctggttgtgtcgcacgctgttgaccacgccatccacatggatgccatacagcagcaaccaacgacggatgtaggacggcgtgcggcccgacgaagtgtagacccacacgctgcagccctggcggcgcagctcgcgggtcagcttgcgggtgccgctgcgcagcggctcacccagccaacggtgcacacacgccggcaagcggctgtgttcggtcgcgctgtggtgcagctggcaggccagcgtgtcatcgatatcgaacgagatacggatgcgttgacgcttgaacacccgcttgattgtgtcgagcactgggtaccttcccatcattgatttccctgatacacaggcacaggtgtgtcgctcaggaaaaactccattggatcaggggccttatcttccaggaacgcggcatattttttcttgatcttgggcaattcgtacaaggccatgacgccatgcttggcggagttgcgtatgaccgaggacgggttgaaatagccctcggcgttgtccagcgtcaacacgaacggcgccaacccctcgcgcatcaacaggtagctgacgatcagcgagccactgcggtggttgccttcaatgaacaactgcggcttgctgaggacccgcacatacaccccggctgcgcgcttccacaccgactcgctgtggtgcttgcagtaccagttgtacaaatccttgatgccaccttcgacattgttgaaaaaatgcacttcggtggccgccaggtgctgggcgtattcacgcctgcgtaccgggtccgtgccgcacagcacggtggcgttgatctccagcatcaggttcagctgctgaaggtcgaacagatcgataccgcgcgccacatagtcgtcaatcagggcgtagccttcaagcacattctgcagcacttcgtccgtcagcgggtcgcgtggctcggtaaagtcccggctgagctgggcaaaacggctctggacctcacgcagggcgcgttcgatggcgagcaaatcaagacgacgtgttgcagtcattggcaatcctgaaaaacgatgaatagcgggtcagctgaacttgccgctgatgtagtccccggtcatttgttcgcgcgggttttcgaagatctgcgtggtcgcgcccatttccaccaggtaaccggtacgggtgccctgggagatgtccaccgagaaaaacgcggtggtatcggccacacggatcgcctgctgcatgttgtgggtgaccagtgcgatggtgtagtccttcttcaactcgaccatcagctcttccacccggcgcgtggcaatcgggtcgagtgccgagcagggttcgtccagcaacagcacttccggctcggtggcgatggcgcgggcgatgcacaggcgctgctgctggccgccagagagcgacaggccgctgaccttgagcttgtccttgacctcatcccacaacgcagcgccttgcagggcgtgcttgacgcggtcgccgaggtcgcccttgtagcggttcaggcgcaggccaaaggccacgttgtcgaaaatactcatcgagaacgggttcggctgctggaacaccatgccgatgtagcgacgtacgaccaccgggtcaacgcctttgccgtatacgtcctggccgaggaagtgcacatggccttcgaaacggaagcccttcaccaggtcgttcatgcggttgaggctacgcagcaccgtggacttgccgcagccggacgggccgatgaaaccggtgatcttgtttttctcgatcggcacatggctgtcacgcaccgccatgaaattgccgtagaaaatcttgtccagcttgcagtccatgaccacaggcgactgggtgataaacggagcggctacttgcgcagttgacatgttcaaaattcagatgctcccgttcttagtacttgggcttgccgaaaatacggctcacgatattcacgaccagcacgatcatcaccagcaccaacgaagccgcccaggcgagctcaagctggttgtcgaacggcatgccggagaagttgtagatcagcacggccagggacgccgtcggattcatcaccgccaggctgccgtcgtggtagatccagtagttgctgaacagcgcggtgaacaacagcggtgcggtttcgccggcggcgcgggccacggcgagcatgacgcccgtgaggatcgcgggcatgccggtgggcaagacgattttccagatcacctgcgagcgggtgcagcccatgccgtaggcggcgtccttcatgatcttgggcaccatcttcatcgactcttccgccgtcagcaccacgatcggcagcatcagcacggccaatgccacgccaccggccggggccgagtatgtgccggtggtcatcaccaccagggcgtaggcgaacacgcccgccaggatcgatggcaagccggtgagcatcttggcggcaaagcgcgaggcgttggccagcttgctgtccggccccagttctgcaaggaaaatcgccgccaggatgccgaccggcaccgcgatggcggcagcgataccgaccatcacgaaggtaccggccatggcgttgccgaagccgccgccagtctcgaaaccggtaggcggcagttcggtgaacacttccaggctcaggcgcgcaccgccacgggtgatcagcatgtagagcacggaaatcagcggcacgctggccagcagtgcgccgaaccacaccagggtggtcagcaccaggctgcgcagggcacggccctcgaaccggcgctgcaggctcggcatggccgtcatcggcgtagaaaggtcagtcattatttagtcccccgctgggcgtagaccatgatcatcgaaccgatgatgttcaccagcagcgtgatgaacatcagcaccagggcggcgtacatcaacacttcgatctcgttggggccggcttcggggaagttcagcgccaacagggccgccaaggtgttggccggtgcaaacagcgacagcgagatgttattggcgttacccaccagcatggccagggccatggtttcacccagggcacgaccgaggccgagcaccagggaaccgaagatgccggtcgcagcggacggcaccatcaccttgagaatcgcttcccagtgggtggtgcccatgccgtaggcggcttgcttggttttcatcggtacacccgtgagggcgtcctgggaaacggcagcgatggtcggcaggatcatgatcgccagtaccaatgcggccggtaacaggcccggcccgctgagggacgtgccaaaaaaaggaatccagcctagttcagtgttcagccacgcagtcagtgggcggatggccgggatcaccacgtagatgccccacaggccgtagaccacgctggggatggcggcgagcaattcgacgatggtgcgaaacaccgccgccagtttggctggcaggaaatcctgggtgagaaaaatcgccatgctgacgccgaagaaacctgcgatcagcaacgcgataagggcgctgtaaagcgtgccccaaatagctggcaaaatgccgtacttgccttggttaacgtcccagacactgccgaacagcacgtcgaaaccgtgcttttccatgccggggagtgccttgcgccctacttcgaagaccagcgcgaagaccagcgccagcaccaacaccacgccgatgcgtgcaagcgcacggaaggtacggtcaaccacgaaatccttggtagagggtggctggcacgcagaatccgggttgaccggtacgacaaagggtttgttcattggttgattccggaacaaggggggatcgctcccgacatggctgaccgcccatgccgggagtggcgtggcgagccttactggatgttggcggaagctttgcgaacttggtcgactaccgatttaggcagcgggatgtagcccatcgagtcggcgattttctggccttcggtcaagctgtactcgaccatttcacgcatggccttggccttggccgggttgccgttgtccttgcggaagatcatccaggtgtaggaggtgatcgggtaggacttggcgccatccggatccggcagccaggccaccaggctttccggcatcttcaccgcagccagggcttcggcaccgctttcggcgtttggtaccacgtacttgccggccttgttctgcaactgggcaaagtcaaccttggccagtttggcgaagccgtactcgatgtaaccgatggcgcccggggtctggcgcacggtggcggtcacgccgtcgttcttcggcgacttgatgaacttgtcgctggcaggccagttgacggtgttgccttcgcccaggtctttctggaactcagggttgatcgccgacaggtgcttggtgaataccgctgtggtgccgctggagtctgcgcgcaccaccacggtgatcggcagctctggcagtttcaggccagggttggcggcagcgatcttcggatcgttccacttggtgatcttgcccaggaagatgttggagtacacgtcgcgcggcaacttgagctctttagggttgcccggcaggttgaaggccagcacgatttcaccagcggtcatcggcagcagttgcacgccttcggccaccttggcgatgtcttcgtctttcatggccgagtcgctggcggcgaaatcgacggttttgttcaggaagtcctgtacacccgcaccgctacccttggactggtagtcaacggtgacgccctcggttttcttgctgaaatccttgaaccaggtgaggtagatcggcgcggggaagctcgcaccggaaccggtcagacggatgctctcggcagcaaacaccgaggtggcactgagagaaaccgcaacggcgagtgcagcagacttcatcagacgtttcattcaggaaaatccttgtgaattacgggctggggaactctgcaacaatcttgttacggttttatgaacgtggagtggcaaaacgcctggttgtccccctctccccccgcaatcaggcattttgacgtcattggttcgtaacaaattgagactaagactttgccatctcccaccacgcgagctccgtccatgtcctcgatcgaagacgccttgatgcaacgcatccaccgtgaactgctggatcacagtgacgaagagctggaactggaattatccgaagacgggcacgacctcaatgcgctgtttgacgaacatgtgggtgaaagcgccgaaaaaaccgcacgccgcatatacttcagcgagctgttccgcctgcaaggcgaactggtgaagttgcagagctgggtggtcaagaccggccacaaggtggtgatcctgttcgaagggcgggatgccgccggcaaaggcggtgtgatcaagcgcatcacgcagcgcctgaaccccagggtctgccgggtggccgccctgcccgcgccgaacgaccgcgaacagacccagtggtacttccagcgctacgtctcacacctgccagccgccggtgaaatcgtgctgttcgaccgcagttggtacaaccgcgccggcgtcgagcaggtcatggggttctgcaacgccgagcagtacgaagagttcttccgcagcgtgccggagttcgagcgcatgctcgcccgctccggcatccagctgatcaagtactggttttccatctccgaccaggaacagcacctgcgttttctcagccgcattcacgacccgctcaagcagtggaaactcagccccatggacctggaatcccgtcggcgctgggaagcctataccaaggccaaggaaatcatgcttgagcgcacccacatcgccgaagcgccatggtgggtggtgcaagccgatgacaagaagaaagcccgcctcaactgcatccaccatttgctcgggcagatgccgtatgaagaagtgcaattgccggtaatcgagttgccacagcgtgtgcggcaggaagattattcccgcagccccacgccgccggagttgatcgtgccgcagctctactgagtcagctgcaagctcgcccccgcaattacaggggcgagttgctcaccacccgcagcgccaggccctcataggcatccagcgtgatcgtaaactcgccttccgccgtcaagtcaccctcgacccgctcattgatgatgtccaccaccatgcccgcgccaatatccggcaaatgcagggtttcggtgatgggcgtggcaccgaagttcagcgcggtgatttgtatgcctttaccggccggcaattcatggaccatcaccagcagccccgggttttccacttccggcacctggatctggcggctggcggcgatgtcataggcacggcgtaccgcgaggattttttgcagctgcgaggcaaacgactcagggtcctgcaactggctgttgaggctgccatacaagcttttcgagcgcggcatctggccggcggacaattcggcatccgggttcaaatccaccaggtcataagcaccgcgatgaatccagcgcgtatcgccgtcctgcatcaagtgttcaacctcttcggccgccagcggcagcgcccccaccaggtcccagcccgacaaggcaaacacccccggctgcatggcgttgtacatcaccaacagcaaatggatctggcgtatctgctggatatccgcttgggtgatggcgtccaggtcgcgaatccccagcgccgccgtgatgatactgacggtggtgcaggacacgccgttggtgacgaacttgaggttgtacggtgcctgttcgccggccaggcgctcgtacatctgttcgcgaatgtgctcgcgcaggatgttcccgggaaaggtctggccctggtacaggaaagtgtcatgggcatgcagggtccagaagtgcaccagttccagggtcagttcatcgtggttctgcaacgcgtggatcagcgagccagggtcgatgccctggcggtgcatttcgcgcagcatcaggcgcaggaactcggcgtcgcccatcagcaacgcgtgctggtaagcgggacgggtgatgaagtcataggacaggtcggcgccgccatgggacatggacgcgatgtcgtccacggtgaggttcaactcctggaaactgaagccgccggccttgcgaatcgccccgccgagcaactggttgccggtgatcgacagcggatggctctcggaccaggccgtgccgtccagcttgcgctccacgccgaggaaaccattggcgtccaggcgcaggatcttcgcccccatcacgtcgatggcgtgcaatgcgtcgccgatgatcatctgctgcgcggcgaaagtcgggtccagccagttcagcgatggctggccttccttgaagtaatgcaggtagacccagcgacgcggcttgccatccacgcccagcaccacgtccgtggcgctccagtcggtttccttgacgccgggctcgaagaagatcacccgctgcagctggccgacgatgtagtgcttgtcacgcaatgcatcgacctgcgccgggctgaggttctgcgcatcgcggccctcggcgacgtcgggcagcaacgaccagtcttcttcgcggatttccaccatgtggtacaggccggggtagtcctcgtacgccatctcggccaggcggaagtccgcgcccttgccggtgtgggacgggatcacatcgtcgatgatcaccgcattgtgcgccgcggccatgcgcgtcaacgcctgcaactgcgcctcggtgcccagttgcgggtcgatctcgaaactgatgcggtcgaaattgccgtcgatggtcggcgtgtgctgtgtaccgctcaaaccgccggattttttcagcggaccgttatggatgccttggatgccgatcttcgacagcgcatgccacaacgcctcatccccaagcgcctccaacaccgtgccgccttcgcgggtcacgattgaggccgggtaggcggtaaaccataccgacgacaacgccgaagcatcccggggccgggtctgcgcgtaaggctgctgccacaaccggccctggcccgagtagagcttggcgcgctggcgggccgcgtgcagcatcgattgttccaccagccagttcacatggttgttttcagccgcagtcataagcgtggtacctgtcgtcgtggatgagtccaacgcggcagtatcaagtctcgataacaccgggtgtagtcatatgaggcgtcgaggggctattcgttgcattgaatgtggggttgcgtcgttcgaaatacgcagcgtgctccggactcgcatggagatggacgaactccctcatcatctcggaatgcggcagaaaacttgaagcgacaagcatgccccagcgttcgctcgggatcgtgttcaacatttcagtggatttcagtgtggtcgtcgaaaacaacctcaacaacacttcatcagaaatcacagcctgttttagtaaatacagttgtagtttgtgatggtcatcgggatggagttgccagagagaatcccccaagacctccaggttcaggaggatgaagttgttcagggcagctcttttctccctgttgtgacgctccgccttggtgtgaaaacgcggcgtgaggatatcggtattcgctcgaaaatatgtccagacggcttcagctttgtcactgaccctatcggcagccatcagccgcacccacagactcatggaggcgctttcaagtgtcgcgaattcgcagtctgtgcgatccagcaaggatctgacccactcaggctcggcataaatagcagtaagcaacgcggccaaagactctgctgactcatccaacatgccagtctggctgagtaattgctggaccagtctctgtgggtcacgctccaacaacgtttcgatcccctccagtcgcaacgctgtcagccgacggtaagttacaggcgactcctgttccgagcccaactcaaatgacgcgcatatcaaacgaagcattttcagttcaggcgcgataaacccccagctcaccaactgcttgaggtcatccgccgcgacggcatcactgaggttataaaattgcacaggatgttgacgcaaccagccccatgtggcctcgcccttggcaagcagcgacacgacatcgctgacatcctgcaacccttcaaggctttctagcacgccgtggtcgcagtcttccagtgcgctgatttgctcaggagccaagctgctgactattgcgcagaccaacgcctgctttggaccgctgtccacaaaacgttttgacgagaacagcccctcaagagactcagggtcggtgtcgtagatagcttgaatcaaggcgggggcgttttcacttgtcaggatggaatccaccacactggcaaagcgtggcatgaattgcgctgccgtgctgaggatcgcgttcagcttccacccatgggtaccgtggtccgcagccgtgtattgactgcacaggtaatcgaccaaccctgcaatcaagccgcgcccctcccccaacgctttttggtcaagtttgccgagcaccctctccgggttattgacgactgtcatcacctctggtgactcaccaccgcgcagggccaggatcaggttcttgtcatcctgcgtgagcgacccttcgtagaagaacccttggtaatcgtagtagtcggtgtcgaaatatccttcacgcatcagataaatcaacgcttttatagacccgagcttctgagtcagtacttcgccatactcggcccttgcagcctctctgaaggacatgcgctggatgcggatgctctgattgttcagcgcttcgattttcctggtaaaaacctcccgctcagccgtcagtcccgaagcgcgttcccggtatgacgtcaagtgcaagacgcgctcactctcaaccgtttttacctgagtgttaaagttgatgtgatggcgactttccatggacagcttccggtttttcttgatcatttcatcaaaaaactcgtcttgtacaaactccgtcaacgtcattgtcacttcgttgtcgtacgtgagatcagtggtgtccacgggattgatcagcttgacgacctgataccaaacgcaaaccctcagctcttccagactcgcaaggtgttcgcgctccacaatcgccagttgctctcgcacgtcagatatctgcgcatcaatctcttttgcctgggcaatacgccaatcaccaaactcattgaagacagaaaaaatcggcccgcgccgcttgagcagctcggcacaggcctccgggtacaagttgcgcacggccaccatcgccaacagtttgttaacgtccagtttcacgccgcgaccacccagcaggctggagaacaggtccagctcgttgatgatgttcttgatcaaccgcatatcgtcgatgtagtaacacaccgtctcgatcagcacagggtcgaaacggcgaattgaatcaaagcgttttgccttgagcaggtccatcatcttttcctgcgagttctccgagttgactacgggtaccacgggaatgatcaggtcaaagaactttgcctggtcgtcagcgaagaacagttcatcgcgtattgcatagatgaagtgcacgggacgcttgatttgtggtgattgcttgatggtgaagttgatttcgcgcaggcgaaaaaacacgtcctgaatgccaaatcgatcaaggtcctcgatcacgacgacgttgatatcactgcgttcgaaacagtagatgatctcgtcgacatgcttgtgcagcactgaaccatggtgaagggattccagtttcccgcctttgagggtcagcccgtcgatgctgaaaagcgacaagtacttcaaggcgcaatacagcaagtacacacccgcagccaggacgaacgccagggtccaactatccggcacccacaacagttgagtgataagccaatcgggaacgtatttgggcataggatcgacgaaaggcaggtacagccgcacaccacaggcaaccaacagggcgaagaacaccgtatgaaagaggttgcgggcattcgaggcgtgtacgatgcgtttcaaccgcgtttttggcaccttacgcgcaggtacggcgtagagcagctgctggacgatggtctcctcaatgcgtggcatcagatcatcgtttttggccggcggttcagccggcgatactgcacgctctgccgggttgtcttgactgaacgtggcaagggagacgaatacaggctcgtattcggggtgacgatcaaaaaaagtcctgatcacgctgctcttgcctgcgccgtacccacccgttatcgcaatgttgcgaacctgctcgttttcgagcgcgtgcagcaactcactgacatagcgatcagcctgcgccccctcgagcaatacaggcgtcaagtctacgaaaccttcttcactcaagggtatcgccttgtgcgctctccataccttgaggaaggcgctgatgctccgtttaaacctgatcactattccttgagtcactgaatcatcctttaacaatctgaggtgcggcatgaaagcgcccaccatgatagctcaatgccatcctcgcagtcctgcaatccatctcaacgtactcgctgggttccacacacagcggtgttgccatcgccagcaagccggctcctacagaaacgcttcattcagcgagtgtcccgatactgcctcggcgtaaaccccgtcgaggccttgaactgccgagtgaacgcactgtggtcggtgtacccgcactgcagtgccacctcggtgatcggcaggtcgctgtgcaataaccggtgggcgtgttccagccgcactttctggatcatctgccggggcgtgaggtggaacacgcgcttgcagtaacgctccagctgcgccacggaaatcccggcgatgcgggtcaactcacccagggtgacgcggcggttgaagtgcgcacggatgtgcgcgtccacggcggccaggcgttgataggcggggtggctctcgctggcggtttgcaaatcgaccgagatgccggccaggccgatgatcacacccgtgtggttgtacagcggccacttgtgggtcaggcaccagccgggttcacgggtgccatacaggtgcagttcgagctggtcttccagcacaaagccctgttccagcacgcggcggtcctgctcggtgtaacccggccccagttgtgcggggaacacttgtgcgctggtcttgcccagcagcggttgcagctgcttgaggccgcagcgttgtaccaacgtacggttggcgaggaggtagcgggcctgggtgtccttgatgaaaatcgccgcattggggatcacatccagcatcggcaacagctgcaccacaccggccaggaactgctcgatgctgtggggtcgattggcctcatccccttggcacagggccgcaaacgcagtctgcaacatgactttcgatcccctgttgaatgcctcgacgcacgcagattgcccgatggtttgagcgctgtcgagccacgaaaactgtgccgatttcgtcaccgatctcggcaaaaaacatcaatcgcgccgccgcccgtgagttcactgtatggccactgcatgcctatccaataactcacaagaaggcgacgctatgtcaggtcaaggcaagttcaagaaacaactttcattgatggacctcacctttatcgggctgggggccatcttcggttcgggctggttgttcgcagccagtcatgtgtcggccattgccggcccggcgggcattatctcctggctcattggcgggttcgcggtgttgctgctggggattgtgtactgcgagttgggcgccgcattgccccgcgccggtggcgtggtgcgctacccggtttattcccacggcccgttgctgggctacctgatgggctttatcacgctgatcgcattttccagtctggtcgccatcgaagtggtcgcctcgcgccaatacgccgcggcctggtttcccgagctgaccaaggtcggttccagcgacccgaccaccctcggctggctggtgcagttcgccctgctctgtctgtttttcgtgctcaattaccgcagcgtgaagaccttcgccatagccaataacctggtcagcgtgttcaagttcatcgtgccgttgctggtgatcggtgtgctgttcaccttcttcaagccggcgaactttcaggtgcagggttttgcgccgttcggcctgtccgggatcgagatggcggtttctgcgggcggggtgatttttgcctacctggggctcacaccgatcatctcggtggccagtgaagtgaagaacccgcagcgcacgattccgatcgcgttgatcctctcggtgttgctgtcgaccgcaatctacgtgctgctgcaaaccgccttcctgggcggcgtgcccacggaaatgctcgccaacggctgggccgggatcagcaaggaactggcgctgccctatcgggatatcgccctggcgctgggtgtgggctggctggcctacctggtggtggcggatgcggtgatctcccccagcggctgcggcaacatctacatgaacgccacgccgcgggtggtgtatggctgggcgcagaccggcacgttcttcaagatcttcacgcgtatcgacgagaagtccggcatcccgcgcccggcgctgtggctgacgtttggcttgtcggtattctggaccctgccgttcccctcctgggaagcgctgatcaatgtggtgtccgccgcgttgatcctcagctatgccgtggccccggtgaccgtcgccgcactgcgccgcaatgcaccgcagatggcgcggccgttccgggtcaagggcatggccgtgctcggtccgctgtcgttcatcatcgctgcgctgatcgtgtactggtccggctggggcacggtgtcctggctgctcggcctgcaaatcctgatgttcgtggtgtacctgttgtgcgcgcgctgggtgccgaccgcgcacctcgacctcaagcagcaagtgcgttcctcagcctggctgatcggcttctacgcagtgaccatcctgctgtccaagctcggcagttttggcggcatcggtgtgctcagccatccgctcgacacccttgtggtcgcggcatgcgcactcggcatttactactggggcgccgccactggcgtgccagctcacttggttcggctggaacacgaagccgatgaaagcgaagcggttgacgcgcctcacgccccgctgacgcctgcgacttactgattcaggagcgttttatgaagcgattgcacgtgatcgactcccataccggcggcgaaccgacgcgcctggtgatgagcggttttccggcgctggaaggcgtcacgattgccgatcagctgcaccacctgcgcaccgagcatgaccaatggcgccgcgcctgcatcctggagccgcgaggcaatgatgtgctggtcggcgcgctgtactgcgcgccggtcacgccgggcgccatctgcggggtgatcttcttcaacaacgccggctacctcggcatgtgtggacacggcaccattggcctggtcgcgtccctgcatcacctgggtcgcatcgcgcccggcgtgcacacaatcgacacacccgtcgggccggtcgcggctaccttgcacgaagacggcgcggtgaccttgcgcaacgttcctgcctaccgctatcgcgagcagatcgcagtgctcgtgccgggtcacggcatagtccatggcgatatcgcctggggcggcaactggtttttcctggtgtcggaacatggccagcgcctgcagatggacaacgtcgacgccctcaccgactacacctgggcaatgctcaaggccctggaagaccaaagcatccacggcgccgacggtgcactgatcgaccacatcgaactgttcgccgacgacgaccacgccgacagccgcaacttcgtcatgtgccccggcaaagcctacgaccgctcgccctgcggcaccggcaccagcgccaagctggcctgcctggccgccgatggaaaacttgcgcccggcgaaacctgggtgcaagccagcatcaccggcagccaattcgcaggccgctacgaatgggacggcgaacgtgtacgccccttcatcaccggccgtgcccacatgaccgccgacagcaccttgctgatcgacccgcaagacccttttgcctggggcatctgagccctccccctactggaaactggagtgaacaccatgagcgacaacatcttcaccggctgcatccctgccctgatgaccccgtgcacgcctgagcgcaagccggacttcgacgccctggtcgccaaaggccgcgagctgatcgatatcggcatgagcgccgtggtgtactgcggctccatgggcgactggccgttgctcaccgaggccgaacgccaggaaggcgtggcgcggctggtggcggccggtgtaccgaccatcgtcggcaccggcgcggtgaacagccgcgaagccgtggcccatgcggcccacgccgccaaggtcggtgcccatggcttgatggtgattccgcgtgtgctgtcccggggtgcctccgccaccgcacaaaaggcgcacttctcggcgatcctcaaggccgcgcccaacctgccggcggtgatctacaacagcccgtactacggcttcgccacccgcgccgagctgttcttcgaattgcgccgcgaacacccgaacctgatcggcttcaaggagttcggtggcggtgccgacctgcgctacgccgccgaacacatcacctcccaggacgacagcgtgaccctcatggtcggggtcgacacccaggtggtgcacggtttcgtcaactgcaatgccaccggtgcaatcaccggcatcggcaacgcactgcctcgggaagtgctgcaactggtggccctgagtaaaaaagccgccaagggcgatgccaaggcccgtcgccaggcgcgtgagctggaagctgcgctggcggtgctgtcgtccttcgacgagggctgcgacctggtgctgtattacaagcacttgatggtgctgaacggtgacaagggctacgccctgcacttcaacgaaaccgatgccctcagcgatgcccagcgtcgttacgcagagaaccagtacgccctgttccgccagtggtacgccagctggtcggcggaacagaacgtcgcctgacccttcgcgcgccgctgcgacgctcgcagcggccaaccctcttttttccaggaaatccccatgactctgacgggcaagatgctgatcggtcagcacgccactgccggcactcgcgaagcgatccgggcgatcaatcccgccaacgataccgccttggaaccggcctacctcggcggcaacggcgagcatgtcgcccaggcctgcgccttggcgtgggcggcattggatgcctatcgcgaaacctctctggaggcgcgcgccactttccttgagaccatcgccgcgcacatcgaggccctgggcgatgaactgatcgaccgcgccgttgccgaaaccggcctgccccgcccacgtatccagggcgaacgggcgcgcacctgcgggcaactgcgcaccttcgcccgcaccgtgcgtgccggagaatggctggatgtgcgggttgataacgcacaaccgcaacgccagcccctgccccgtccagacctgcggcaacgccatatcgcgctcggcccggtcgcggtgtttggcgccagcaactttccattggccttttccgtggccggtggggataccgcctctgcgctggctgccggttgcccggtcatcgtcaaagcccacggcgcgcaccctggcaccagtgaactggtgggtcgtgcggtggcgcaggcggtcaaggcgtgcggtctgccggagggcgttttttcgctgctgtacggttcgggccgcgaggtgggcattgcgctggtcaccgacccgcgcatcaaggccgtcgggtttaccggctcgcgcagcggtggcctggcgttgatccaggcagcgcaggcacggccagagccgattccggtctacgcggagatgagttcgatcaacccggtgtacctgtttccggcagcgttggcggccaggggtgaagcattggcccagggttttgtggcgtcgttgacccagggcgccgggcagttctgtaccaacccggggttggtcattgcggcgcaaggcccagccctggatcgcttcatcagcctggccagtggcttgctgccgacctgtggggcacagaccatgctcacgccgggcattgccagtgcctacgctgcaggcgtaggcgaactcgctgaacatgcaaaggtggccgcaaagggtttgccggtgacaggccccaaccagggccaggcccatctgttcgtgacccaggcgcaggcattcctggccaatgagcatctgcaagcggaagcgttcggcgccgcgtcactgctggtcgtctgcaccgacaatgaagaagtgcgccaagtatccgagcatctcgaaggccagctcaccgccacgttacacatggatgagaacgaccttcccgaggccaaggcactgctgccggtgctggagcgcaaggccggtcgcttgctggtcaatggctggccgactggcgttgaggtgtgtgatgccatggtccacggtggcccctccccggccacctcggatgcgcgcagcacatcggtgggtacggcggcgatccagcgtttcctgcggccagtgtgttatcaggatttccccgatgcattgctgccggccgcgctccagcacggcaacccgttgctgctgcgacgcctgcttgacggccagagagaggcataagcgatgtccgatcccgatatcgtcgtagtcggcgccggcatcattggcgtcgcctgcgccctgcaactggcgcgtcagggccggcacgtggtggtggtcgatcaacaggaacccggcatgggcgcgtcctatggcaacgccgggcacctggctaccgaacaggtgttcccgattgccgacgtgtcgatcctcaagcgcttgcccggcatgctgctggaccccatgggcccgctgcgcctggattggaaatacctgccgcgcgccctgccctggtttgcgcggctgctgttgaacctgcgtccggcgcgctaccagcgtaccgtcgcgggtattcgtgcgcttaacgaaggcagcctggacgcctggcagcgcctgctgcacagcatcggacgtgcgcacctgctgcgtgaagacgggtcattgttggtgtacgaacgagcggactcacgcgacgcactccaggccttgcagcagcgcatgcaagcgcagcaggtgcccgtggcgttctggaccggcgatgccattcgccaggctgcgccgcagttgagcgagcgcatccagggcgggctgtttttcccgagcaccgggcacttcctcgacccgtaccaggtggtgtgcgaactggtccaggctgccaaggccagtggcgtagagttcttcaagcgccaggtactggatggacgggttgaggaacacggcgtctccctcaccaccgatcagggcaccctgagcgcacgccaggtgttgattgcgtgcggcgcccactcggccaaattgaccgctgccctgaccggcaaaaaggtcccgctggacacggaacgcggctatcacctgatgctgccccacgagccgcatcgcctgccgtttgccgtcacctccctggaacgcaaattcatcatgacccccatgaccgacggcttgcgcctggctggcacggtggaattcgccggcctgaagcgcccggcaaatatgcagcgtgcctggcagttgcatcggttgagcaaggggttgtttcgggatgacctcaacgcagagggtgccacaccgtggatggggttccggccgtcactgccggactcgttgccggtgattgaccgggtgtgtgacgggaaggtgctgcttgcgttcgggcaccagcatctggggttgacgcaggcggcggtgacggcggagatgattggggaattggcgagcaagggtcaaacaccgttactcacgccttatcgcctcgaccgcttctgaccaacgcgtttttttgcggtgagttgcctgttgtggcgagcgggcttgccccgcgttgggctgcgaagcagccctgaaaacaaacaccgcgctctgtctgacaggcggcggtgttttctattgggggacttaatcatggggtttgagcagccgtgctgtagagtgcgtcagccatttcctcaatttcatcacgcatacaaagcttgttcagccaacccgtcgggatgccttgcacgccgtaatatgcacccgccaactgaccaacgatggcggcagtagtgtcagcgtcgtcacccaggttcgcggcagccaacaccgcgtcggcgaagctgtcagtatgttttacgcaccacagcgccgcctccaatgacgccacggcgtaaccggaacccgttatctgcgcacgggtcttgttgcaatactccccctgggcaatcgctacgactttgggcgcagaaagacccgcgcaagagatattcaacaggcgctccttcgttgctccactcaacgcgttaccgatggctctcgccaacaccacgcaacactcgattgcctcttgggctccgtgagtcgtacgggagctttctcgggaaaagtcatcaacgctttgcaggtttggaaagtaaaacagtaccagcggcgcgaggcgcatcatcgaaccgttgcctgcggaaaaaggctctgtcgaacctgcaaacggatcaccttgcgactcaaacgccgtgagcgccgtgcgcacggtcatgcctatatcaaagcaatcaccggtagagctcaggtaaccccacttccaccagttcaggtatcgccccatctggtcagctgcatcaaaaccacctttacgcagcaagctttccgcaaggcacaacgccatcgaggtgtcgtccgtccattggcccgctttcaggttgaacggtcctcctccaaccatgtcggtgaccggtgggaatgtgccgcgaggcatgaattcaacagtggtgcccacggcgtcgccacaggccaagcccaacaggctgccacggtaacgatccaaaagcgtgagagacatttgtcatcctttaaagaaagtgagtcagtcagcactttacttgaccaagcgcttctccttcgaggggcgatagccgaagtacgagctgtagcacttgctgaaatggctcggcgacacaaacccgcaggctaccagcacctccacctgtgacagctcggtgtgctgcaacagccgccgcgcctcggtcacccgcagctccatgtagtaccgctgcggggtggtgcccagttgctccttgaacaagcgctccaactggcgccgcgagcggccggcgtagaccgccagttggtccagctccaaaggttcttcgaggttggcgtccatcagtttcaccacttcacgcaatggcgcactgacgctgacgttttcggtgggtttgatgcggcggtagcgggactcttcgaaggccaggatgtcttcgatgccttcgacaagtgccttgtcatgcagggctttgatccagtccaacgccatgtggaaggcgccggacgggcttgaagcggtgaggcggtcgcggtcgatcacgtagggttcgctggtaacgtgagtggccttggagacttctgccagcgccggacggtgttcagggtgaatggcgcagcgatagccctgcaacaggccggcgcgcccaaggaaccaggcgccgttccacaagcccgcaaggctgatgccctgttcggcggcggtgtgcagcaggtggatgaaggcttcgccggccttgagttcggtacggaatccgccgcagatcaccaacaggtccaggtcgtgcaataccacggcatccaggcgcgcatcggggcgaatcacaaggccaaggtcgctgatgacttcgccctcgtcacagccgaaggtgcgcgaggcgaacagttcggggcgcagcaggttggcggtgacgaaggtgtcgagggtctgggtgaatgccggcagagagaaatgttcgagtaacaggaagccgacgcgggtgaccgacgccggctgttgggtttcgttgaggtagcgcaggttcttgcctttcatgccaccgctgaattgacgtctttccatcgagggttggcccactcttattgttgaggtctttgaaaaaccggccattacgggcgaacactgtagctgtggcgagcgggcttgtcccgcgttgggttgcgaagcgaccctggaagggggaatgcggtgaatcaggcactctgtggctgctggttttggggctgcttcgcagcccaacgcggggcaagcccgctcgccacagcgtatttatcgcctgttgtgcctagagacctggctgccgcaggcgctgatcctgagaaagccacacgcactgcaagcccccggctgaacagcggcaagcgcatctgatacggttttttctttgctatctgcgtctgtatcgaaacgccgtctgggcggacaatgaccccatccccactcccttcccttcggaggccttatgaccaagatggcacttttcctgttcggctttttggtgctgaccatcggcatcggcctgttggccacgatctcgccggtctgacgctcagccggcaaacagcatcgggtacagcgacagcaccagcagcccggccatcgtccagttgaacaggcgcaaccagcgcggctcacgcagcacattgcgcaagccgctgccacaccccacccatacacacactgggcaggttgaccacggcgaacaccagtgcaatcagcagcacattggtgacgtagccttcggccggcgtgtaagtggtgatagcgcccagcgccatgatccaggccttggggttcacccattggaatgccgccgcgccgaggaaagtcatgggcttgccctgctcgtccgcgctgtcggacatgccgcccgctgtcgcgatcttccacgccaggtacagcaagtacgcagcccccacgtagcgcaacaccgtgtatgcccacgggaacaccttgaacacttcgcccagccccagccccaccgaaatcaccagcagcatgaacccgatgctgatccccaatgcatggggcatcgagcggcgaaagccgaagttcaccccggaggcgaggagcatggtgttattgggcccgggcgtgatcgaggacacgaaggcgaacagcacaaaggcggacaacaagctggtagacatgaacatgacgcggcatccaaacggcgggggtgtgcctgcgacagtagagggttatcggctaccctgccccgtacagccagggccggattgaggcatacacttttttgccatggttttcacaaacctttcacagacaagcgcctagggtggcttcagctcctaatgaacatccctttagcccgcgctccccacgcgggcttttctttgccctgggtttatcgcaggcaaaaaaacaggcaagccgtgcttcacggcttgcctgcctggcctatcggttaacgcggtccgccgccagggccagggccgccgccctgaccatgcccgccaccgccgtgaccaccgccaccacccggtggcatgaacatcaagcagccggacaaggtcgataacagcgcgaccaccacagccgccttggttagataactcaacttcatgactacactctcttacttgacgagattgacttctcgctgggtatgacagtgcaaaccgaagtgcgtcacggctatcgtgtaacccgttggtagggtttgtagggccaacggtacaaactgctgttttagttctgcggccgctgcttggtcgaatccagctcggcttttttacccgtggaaatctcagtgatctgcgcagacttggcaatcgcgaaatcgaaggtgtcctgcatttttgcaatcgcgtcggtcgacgtgccgttcagcccaccgttggcggcccaatcgaagttccacacaccggagaggttatcggcacccggcacatcgtgggtttcgatggcggtgaagacgtcaggatgacgctccatgtacttggccgcatcggagacttcggccggcaccttgcccgaggcgttgttggccagttgggtcagttcctgcttggtaatggctgacttgccggtctggcgcatgtagtcggcgatcactttgctggacttggcgatgttcaacttgtcatcgaacaccgacggtgacgctttaggcgtgtttgccccgctgccggcgggcgttacggtggtagacatcggcgctgctcccctgatggtacgaatgaaatcgtcgtgctgacgatagccaggagcagacgttagcatgggcaatgggccattaatctgtgcttcacaacaattcacaaggccagggtctgcggcttctgtgaaagcctgcgaatccattaccatgagccggtattcatgctgattgattgccagccccctacccggaccccagtcatgagagacctaccacccaccgccaccctgcgtgccttcgaagtggcgacccggcacgcgacgttcacatcggcttcagaagagctgcatgtgacccagagcgcggtcagccaccaactcaagcacctcgaagacctgtggggcctgcagttgttccagcgcggcaaggcgttgcggctgactccggccggggccgcactggcgcccattgtgcgcgagtttttcatgaaccttgaggccacgctggctgacctcagggaacaaaaaggccgggttcgcctgaaggtcagcaccacgtattcgttcgccttgaaatggctgctgcccaggttgcccagcctgtcgcagcaacatccgcaaatcctgatcacgctggagaccagcgacaaggccatcaaattctccagcgcagacgcggatgtggccatccgcctgggcaacggcaattaccccggcctgcactcggagttcatgctccgcgagcagatcttcccggtggccagccccgacctgctcaagcgtttcggcgctccccacgagcccgccgagctgctgcgttacccgttgctgacgcgagacggcgcagacctagtgcccaagtgggaagcctggttcgagcatatcggcgtcagcattgcccccctcaaggaaagcgtcaggttcgctgacaccaacatgaccatcgaggcagcgctgctgggccaaggtattgcgctggcgcgaagcggccacgttgaagcggaaatcaacgacggccgcctggtcaggctgtttgagctgccgttcgcgtcaccggtcggctactactttgtgtgccccaaagggatcgaaacccagccgcatatcatcagctttcgtaactggttgttagccgagtcgatgcaggcacagcagaattatcagtgatgcatgaagaatcactcatgaccgaatgaaaagacttcgctgttaaacacgcacttgtggtgtttaccatggcgcatgcctttacccatcgttctactcatcctcttcgccgccctcttgcatgcaagctggaacgcgttgttgcgtgtcggcgccgacaggctgtggtcaatgaccatgatgtgcgtagcagtcgccatcgccagcttcgtaatagccttgtttctcgcccctcccgcgccagccagctggccctacgccgtgctgtcgggcgtgttgcacgtgggctataacctgttcctggtgcgaagctacaaggtgggcgacctggggcagacttacccgattgcccgcggctcctcgcccattctgatcacgctgtgcgcattggtgtttgccggggaaacggtcagcacaaacgcgctgatcggcattgtgctggtatcgggcggcattatttcactggccttcagacagcgcaggctggcggtgcccagcctgccctacgccctgggcacaggttttttcattgcggcctacagcgtcacggacggtattggcgcgaggctgtccggcgcaccgctggcctacaccgtatggatgtgtgcgctctggggcgtattgatgccactggtgtacatcggcctgcgcgatacacgcagcctcttcgcaccacgccccggcgtcatcacggccttgatcggggggcttgtgtccctcctggcctacggcatcgtcatttacgccatgtcccacgcgccgatgggcgccgtttcggccctgcgcgaaaccagcgtgctgtttgcggcattgatcggttattgcttcctgggcgagtcgctgactgcccgcaaagtgttggcgtgcctggtcattgcgatcggcacgatgctgataggttgatctttcacccctcacaggaggttcaagcaatggatacggtctcttcaaccccactgattctgatcaccggcggcagccgcggtgtcggcgcagcaaccgcacggcttgcggcggcgcaaggctacgatgtcgccatcagctacgtcagcaacgaggcggccgcgctcggcgtggtcgcggatgtgcaagcgttggggcgccgcgccctggccatccgcgccgacagtgcagaccctgaacaggtcgcgcagttgttcgctgccattgaccagacgtttggccgtctcgacgtgctggtcaataacgccgcgatcattgccctgcaatcgcgctttgaagacctcgacttcgcccgcatgcagcgcgtcttcgcgatcaacgccatcggcccgatgctgtgcgcgcagcaagcggtgaaacgcatgtcgctacgccacaacggcacgggtggaagcgtgatcaacgtgtcctcggcctccgcccggctgggcagcccgaacgagtatgtcgattacgctgcctccaagggcgccctggagacattcaccatcggcttgtccaaagaggtcgcccgtgaaggcatacgcgtcaactgcgtacggcctgggcatatctacaccgacatgcacgccagcggcggcgagccaggtcgcgtggatcgggtcaaggacagcattcccatgggccgcggtggcgagcccgaagaggtggcgcgcgctatcctgtggctggccggtaaggaagcgtcgttcatcaccgggaccttcctggatgtgacaggcggcaagtaagcggcaaccaccgattatcgggaggccagttggtcccggcgccgggccagcccttccagggtgaaccgcgcctgcatcagcaccacctcccgcaccagttccatctccttctggttcacttcgctccacttcaaggcttccagcagcttgggcttctggatgcggaaggccaggccctgggtaaacagcgccatggaatggatcaccgtgcgctcatcctccagcgccaggccggccacgcgcgcgatcagttcgcggatgacccgcgcaatacgcgccttgaaccgctcctcgaaggccatcgtcgcgctttgcgggcacaacccagcctggtggcgatccatgaacgcacgccatgccgtggtttgcgggctgtcctggatggttgaaaccacggtaccgagaatgcccagcgaggcgtcgatcagcgcgctgtcgccgcaatcggcatcggccaacacgctttccgctgcctccaccggcggcgacatcttgcgccacagcagcgtgatcaagtgctcgacgcacgccaggtacacgccttccttgccatcgaagtagtactggatcgcaggtgcgttgacgcccgcggccgtggcgatatcgcgggtcgacgcgccattgtagccccgtgcgccaaacacctcgacggcggcctcgatgatgcgtgcgcgggtttcttcgccgcgctggtaaccaccctcggcggcaggtttgtgtcgtgccatgtgcagctcccttcgaataccggaccaaaatataccagttgacaaaaattcgcgaaaaaacgaatttattccacccgttataaatctggagtgacctcgatgtcggctgcacctccctcccctcaggtcatgcctgaagaaactgtcaacggtcaacgcggcaaggcccggcgcatcctgctcagcgtggccggcgttgccttgttggcgggcgtgtcgtggggcgcctggtggtggatcaccgggcggtttatcgagaccaccgacgacgcctacctgcaagccgacagcatcagcgtggcgccaaagatcaacggctacgtggccgacgtgctggtgagcgacaaccagaacgtcaagcgtggcgacgtgctggtgcgcctggatgcgcgcaagtaccaggccgtgagcgatgaagcctcggcgaccatcgccgcacgcaatgccgacttcgccaaggcccaggccgacctggtgcaacaggactcgaccatcgccgaagcccgcgcccaattgcagggcgccgaggccgatgcccggcatgcgcagaccgaagtcgcccgctacgcgccgctggcccgctcgggcgccgaaccggaagagcgcctggcccaactgaacaaccaactggcacaggcccgcagcaccgtggcggccaaacaggcggcgctgcggtccagccagactcgctacggcacgttgcaggcccagctcaagcaggcccaggcgcaactgggcgtagccagggccagcgaggcgcaaagccaactggacgtcgacgacgcggtcatccgcagcccgctggacggccgtgtggctgaccgtggcgtacgcgtggggcagtacgtgcaacctggtacgcgtttgctgaccgtggtgccgatcagcgcgatctacctcaccgccaactacaaggaaacccagatcggtggcatgcgccccggccagaccgtcaccgtgcatgtcgacgccctacccggccgcgacctgcaaggccacatcgacagcctggcgcccggcaccggcgcgcagttcgccctgctgccgccgtcgaatgccaccggtaacttcaccaagatcgtgcaacgggtaccggtgcgcattgccctggacataccggatgacctgcgtgccgcattgatgccaggcctgtcggccaccgtggaagtcgacacccgcacccacgccgcagacgccaaccatggctgaggcgagcatggccggggtggctgccgagaaaccgcgcaacgcctcgctgaccgactggatcgccgtcgccgccggcgcgctgggtgccctgctggcgaccctggatgtgtcgatcaccaactcggcgttgccgcagatccagggccagatcggcgccaccggtaccgaaggcacctggattgccaccggctacctgatgtcggaaattgtcatgatccccctcgcggcctggctgacccgagtcttcggcctgcgccgcttcctgatcggcaccgcactcaccttcacgctgttctcgatgttctgcggcctgtccaccagccttggcgcgatgatcgccgggcgcattggccagggcttcgccggcggtgcgatgattccgaccgcgcagaccatcgtgcgcacgcgcctgccgccccaccaactggccatcggcaccacgatgttcggcatgaccgtgatcctcggtcccttgctcggcccggtgatcggcggctggctgacggagaacatcaactggcgctggtgcttctttctcaacctgcccatcagcatcgcgctgatcaccttgctgatcaccggcctgcccagcgaacgcatgaacctgcagcgctttatcagcgccgactggctgggcattctcggactggcgatgggcttgagctcgctgaccgtggtgctggaagaaggccagcgcgaacactggttcgactcgctgctgatcgtgtggctgagcattgccacggtcaccgggtttttcctgattgccgtggggcaattgcgctccagtacaccgatcctgcgcctgccgttggtgctcaacaaaagctttggcagcgtgttgctgatcggtacggcggtgggcgcagggctgtatggcacggcctatctggtgccgcaatttctcgggattttgtccggctataacgcgcagcagtccggcgcgatcatgctgctgtcggggattccggcgtttttgctgatgccgatcctgccgcggatgctcggccgctacgacctgcgctggatggtcggcgcaggcctgctgctgtactgggccagttgttttgtggacaccctgttgaccgccgacagcgtcggccatgattttgtctggtcgcagttgctacgtggcttcgggcagatcctggtgatgatgcccctcagccaactgtccatgcgttcggtcgagaccaaggacgccggcgatgcggccgggctctacaacatgtcacgcaacctcggcggcaccatcggcctggcgctgctcggcgtgttgatggaccggcgcagccacttccatgacgaccggctgcgcgaagggatcctggccaacagccaattgacccaggatcacatggccagcaacaccgccagctacctggcacagaccggcgacgcctccaccgcctcgttgcaagccatggcccaactggccaatgacatcgcccgccaagcctcggtgatggcctacaacgactcgttctacgtattgggactcgcaatgctggcgtgcctgcccctgatcttcatccttaaaaagcgcacggtacagccatgattgctcgctcgtttcctctgctcctgaccgttggcctgctatcggcctgcaccgtgggcccggactactcgggcgcccccgatgccgcgccgaaaaccctggccgccgggcacctgccccacgccgaccacaaagcgcccagcgcaccggccgtggcgcagtggtggcgaacgttgaatgacccgcaactcaatgaactggtcgacctggcgctgaacaacagccccgatatcgccaccgcccaggcccgcctgaaacagtcgcgcgccagcctcagcggtgcacgggccgacgccctgcccaaggtcaccggcgacgccgcgatgctcaaactgcgctcgcccgacacctccgcactgggtggcggcggtggcggtcgcgggccattgacgctctacctggccggcttcgatgccagttgggaggccgacctgttcggcggcacgcgccgtgcggtcgaggccgcgcaagccgaagccgacgctgcccaggcgcaactggctgacgcccaggtgcaactcgccgccgaagtggtgcaggcctacaccgacctgcgcgaccaacaggcacgcctggccctggtcgacgccagtgtcgacatcgaaaaccaggccctcgacctgacccagcaacgtcgcagccgtggtgtggcctcacagctgcaactggaacaagtcctcacccaggcagaaaacacccaggcccaacgcctgccgttgcaagccgccatcgttgaatccctggaccaactcggcctgctttgcggccaggaacccggtgaactggacggccgtctcgccaccgccaaagccctgcccgccatccccggcgtggtgcccgtggcagaccccgccgccctgctcaaggcccgccccgacatccgtgtcgccgaacgcaaactggcctccagcaacgcacagatcggcgagaaaaccgccgactggtttcccaagcttagcctgatgggcgacctgtcgttctccgccggcgaccccggccacctcgcccgcaaagacaacggcacctggctgatcctgccgcgcttgacctggaacgccctggacttcggccgcgtggccgccagtgtcaaaggcgccgaagccggtcgcgacgaagcgctcgcacagtacaaaagtgtcgtactgagcgcgctgcgcgacgccgatgtggccctggcgcggtacggccatcaacgccagaacgtcgtgctgttgcgcagtgtggaatcctcggcagtgcgtgcggcagacctgacccgccaacgctaccgtgccggcaccgccagcaccctggactggctggatgcggagcgcacccgctaccaggctcaggagagccggatttccggcgacgcggagttactcaaggattttgcttcgttgcacaaggcattggggctgggctggaccttatgacacactgcctcgccaagcgccgcctgacacgaggacagcatgctccgtattcatccagcaacccacgccgaccttgaagccctgcgcgacgtcggctgcaccacctaccgagaacacttcgcgcacatctggtcgcctgccggcttgcaggccttcctcgaccgcgacttctcccctgcctcgttgaaccaatcactcgaatcatccgacagccaaacgtggctgctcgcgtcggacgaaagcgagcggcccgtaggccttgccaagatcaactggtcagcccctgccccggtcacgggtgaagtgggcgcagaactgcgcaagatctactttctcaaatcggcggctgggcgtgggtatgggaaacgactggtgcaatacatctgtgaacaggccgtggaacgtggagacagcttgctgtggctgacggtactcacgtccaatccggatgcgcggcggttttatcaggcgtttggcttccaggtgatggggcaaattccattcaagactgacttggcagagattgggatggatgtcatggggtttgacctgaaacggttggggcaataaatggaagaattgatacgagggctcgacgggcccaggacggcccagcaggagttgttctacgacctggaagatgcggcggcagtgattggctggtcggtggttgagttgaccgctttggccgccagcggtcggacgccggatgaggtggcggcgctgatgaaaatctgcgcgttgctggcggcgcagcaggagaagatccgcgcgtatgcgggtgaggttaaggatcagcggattgtcagggctgacgtccggtaaatacgcatgttcgcgggttcaaaaagggatttacggatgccgttttcattggaagaaagaaccgcgttactcgcactcaaaggcgtgggaccaactgttattgctcgattggagcagatggggattacgtcgatggcggtgcttggcaaagcggatgccagtgacatcctgacgcaagaatcggcagcgttacagtcgacctgttggaagaatagtccgcaggcgcggaaggcgattacggcggccatggagcttgctaaaaagggcctatagaagttccttttgcaagtgtcccttcacactaactagcgcgcatcactaactacgcagggcagtgattattgaaatccttgacgcaataaaagttttcacctcagcaacatcttcaaactcagtcaccgcgagactcaacgacaagcgagttatttccagagcactacgttcgctttcgcccatccgcttagaaagttctccaaggtcttccatagactttttattttcaggcgtatcttttatatctttcaaaggaccaagcatagaaagtgcagtattgattcgttcacgataggcgttagcggcgctatgctgataattactttgttgatccaacatttgcagaagcccacttttataatcggcgactctagagcttttcaaagcgctatcggacaactcggtttgtcgttgctgctctataaatgccaggcgttgctgatccagtaaactactatactcttcacgctgagcatccatcatttcccgctgcaagctgatagttttcagaatagcaaccaacgtaacaacggaaaccatcgggccaaacacgccaccgaagaaagagccaaacgctgaccaattgttgggctcattagataggccatacctaaatacccacaaataagacgtcacagataagagtaatgcgataactaagatgctgattccataccgcaacacagcgtcgatacgcacaattcggcgtgcatttaactcatccaatgagacattcgacttttcaatcatcaaaggtcagctccctattttagaaacttcagaaatcacgttttcaaaggctcgtaagcccgagcaaaaaatgttattggcatatcttataattgttgcaaccgacggcgtattctaccccgacgcaagcctgttttcctcaactgctgctaactcagcattttctacacccaataaaaaccccgtagacgctaatctacggggttttcaagagtggaggccgaggccggaatcgaaccggcgtaggcggatttgcaatccacacaaatcatcatatttatcaaaaatatacgactctatcaattccgcacctccgagatttagggtggtcagagcccaaggaaatcgggggcacgatttcgattgcggaatggatttcctacgcttcgtcggcttcggtcgcaccggatgccatttcatactactgtgcatagatacagtatttagattaaccaaaccatgcacctcgatgaagaaacctgcgaatggctcggactgcccacgattatttaagctcaaccggacttaagggtctggcctgcacccattggcacgagggctagaaacggccctagaatggttggccgcgcctggccacagcgcgcgcttcaagactcccgagtggctcaaagtcaacgcgagtattggtaacgtgcgaaactaagccaccccatttgtccaacaaccgggctacactgcataaactttgataccacccccatcatcacactccctcacgcataggttaccaatgagcgtaaaagcatttgccactcagcttatgaattcaattaaagatatcaaaaacaatagtgaatcggtacagtgcgacagcttaattgcataccttgaaaaagtaatagctgatccaaacagcgaaccgacacccagccaaattgaatattataagtaccaacttcaattaatggttgagggagagaaaggcagtcacgcttcctatcttgaggagttccgcgcagtgattcagtcaggacaaaacgccatgaaaaccgcgcttttgatgaacggcggagcatcgattgccctacttgccttcattggaaaactcaccgagaagcagcagtatcaaatccctcacttcgcggaagctcttgcaatttttgttctaggcgttttcttcataggtgcagcttcaggtacgacttacttaagtcaatggttttatgcagagcccgaaaaatggaaaatacgcattggaagtgccttcaacactatatccatattgctcggcctaacctctttggggttttttgtttggggaatgtgcaaagcttattctgcgttcctagcattcacttaattacctactacttgcgttgactcctctcaaatatgcttggcaggcccgaagcgcgatcaatccttggtcgccggcgtcggtgatggcgacaattctttgagcgtgcgccggatccctcagggtctgaccccactttcttcaacagccattgctagggccaattgtttcgctgccaaagtagacataaccacctcaaacgtgacagacaatgaaaaatacacaatatttttttgtttttttaacgttattttacgcttgaagaaatacaaaaaattttgtaacctccaagaatgacagccccccctgcaccaagtcgcctcgctttagttttcaaaaagcgccgcgaagaattgaatatgactcaagaggatgccgcgcgccgggtgacagaacgccttgcacctcaaaaaaaataacgcaacaaacatatgcatcgtatgaaaagggtaaatcacagtcatcgaagcactccaccatcatcgcagacgtactggacctcccaattgctgtagtactagaagcaaacttaccgaacgggttcaagccgattgaatcagcgtctagatccaatgcatctctaattgcgccacacctcttggtgtgggacgagaaacctccactttacgacgaagtcgaggttccctttttcaaggaaatagaactgccaagtgattccggacggagcgaaatacaagagtgcggttcagtaaagctacgaatcagccaggctactctctcgagcatgaatatcagcgcagaaaagataatctgtgcgcaagtatctggagcgagcatggagccagtcttacctaacggtagtaccgtaggtattgataagagccgaagaactttgaaagatggcgacatgtttgcactaagtcataataatcaactccgcgtgcgaatcttatatcgcttaccgctcggaggcctgcggatgcgtagctttaacagagatgaatatcccgacgaagaatactcagcagaaagagttatatcagaggacatagtaattacaggtagagtattttggtattccgttctaaggtgatattttcatcaagcaccccgctgcagcactaggaattcgcatgctttattcgtaaaaaaagaccgatctaaataacatccctccaactctttgacagatttaattatggatcatgtaaaggattacctcgcgaaatacccgctatacgaatcactcagccaacggctgaaaatcttactgaaagacattgcggatgcggacaatatagacctgcatgcgatcgaagcaagagcaaaaacaccagatagctttgcatccaaaattactagacccggaaaagattattccgaccccctgtcagaaatcactgacctttgcggcattagagcaattctctattatcaagaaaatgttgaccaactcgctgacgccataaaaaaacactttaacgttagcacaacagactcagtggataaaagaagcgagttaaaccaagatcagttcggctatatctcactgcatctaatttgcgagataaataacgcccgcgcaatgcttcccgagtggaaaatatacgaagggctaaaatttgaaatccagataagaactgtacttcagcatgcctgggcatctatctctcaccagttacattacaaatcaaacgcggatgacaaggataacttcactagacagctctcgagaattgccgggcttcttgagctgtcagatgaacaattctcggaactcaaaaagaaaagagccactattaaaaccagcgtcaaacaaagtattgccaaaaaagatttagacctatcaatcaacagcgtctcgattgaacagtttctttcttcatctaaagtcttacgcgagattggggtcgcggttagaaaagcaaaatttaaacttactgaaagacagctagatcccgctcatatgttttcattctgccaaggcttacagattacaaccttacaggagctgaactcactactggaaaaattcgctcctagagcaattgagtttttcaatgagttcgcagaactaagcgacccgacatcgacattaggtggttatgggcattggggagctgtcgcaatagtaagcatccttcgcaacgaaaaagatttgacattcatcctggatgaggaaatctggagtgcggattacctcgaaaaggttaaatctacagccgacaagatatccttataacagccaacattatgagtcagtccggggtttcggccccgatggctcatacatagccgaaccaagccaacctcagatctacgatattttattgtatgcagtcgcaattttttgcattaacaaaatataccgtttaccacttaacaaatttacacgtatcgtctttatcgttatctctcaccgaagattacgagccatgcaaacgacacagcacagcaaaacccgccgctcggtctaccttcaacccgcggccgcaaccagccccgccgccgtagaacgcatccagcacagcaccggccttctgcccatcgtcaatcttgggcgcgcgaccattgcccccgcccccgcagcggttgcccgcgatgaccagggcccatgtggcgcgcccgctcaaggctgtgatgcctgaatagaagtacgtcgaacatcagatcgcgctgctgtcgcacatgttcacgatcgcacgctagtggggcctgacaaacaactccaccccttgcttcggtgtgcgccgcaacaaagagaccccacgggattattacgccgcgatatcgtgtggaatgaggtgtacgatgcagccgtacaggaactcaaagacgctatggacctggcttatctgaccggtcaacgacctgccgacgtactcaaagtggccaccactgatttgaacgccggattcttaacggtcaagcaaggaaagacagcgaagaaactgcgcctacgcctagaggatgacagtgtgctgtctgccctgagtgcctttatcaatgacctacaggcgcgtcgagcgcacaacggcattaaaacatcgacgctgatcaccaacaagtccggacttcgcatgagccagcagaagctacgcaatcgctgggacgaagcacgcgaaaaagcagccatcaaagccggcgccgacggcgactctgcgctggcagtactgatccgccaattccagttcaaggacattcggccgaaagctgcaaacgagatagaactgacgcacgccagccgcttgcttggccatacaacagaggagatgacaaaaaaggtctatcgaagagtgggagaaatagtaaaacccactaaatgagaggctctaggtcctcaacatactgctcaacgttccttctagacaagatcaaaaacttgtgaacatcgctgatagaaccttcgaagtgaaattccacccagtcgtactctttcattacatcaattgcactatttatcttctcacgcaattcatgagcaggcatcgaattagataaagatacagggagagcactaatcaacgccccatctatagttccgctcagattaatatcgctactatctcgaatcgtaatcagaccaccaccaatattaatggtattagacggagaattttttctgacctgtggtttcagacggttatgtttattgaaatttgtgtgagagcaaagatcagaaacccagctatctccacaattgtgaggctgaatagattcaaccaccgcgagcaggtctggtctttgttgcgccaagcccggaagattttttgagaggctttttacgaaactctcctcatcttttccataaggaaaatatggtgtgtttttcttttttgtataactctcccaaatatcctgtgctgtatattcaagcacgctccgcaagtgctccatcgtagacttaactaatggtttcaacacctctaactgaagatcatccgatcgagcgaaatcatatttcctctcaattgctaaaatattcgcactgcactcttctaaaagtgcttgtatgtctgcgcgccttttcatcagtcttttccttcattttatccgagagggtctgtaacgcgaatgtatcacttgaaccgataaacgaacaacgcagcacctgtcctgcaccgctgggggacaaacggaatttttggcaaaactccaggcaggttgcggaaggggtgagaaaagttgcggaacggatactaaatcgcaggcaataaaaaaccccgtagatcattgatctacggggccttaagagtggaggccgaggtcggaatcgaaccggcgtaggcggatttgcaatccgctgcataaccattttgctactcggcctcaaacgatcaatgtcctgactgctgacactcaccgcataaaaacttgagtgggctgtataaccctgcctctactctaactcattgaatacattgaagtttttaatgcttcgttgcgttcgatgggcgccattatgtacgtatttgcctaggcgtgcaaccccttgatttcaaaaatatttcgtattggcatcaaggggttgcgggcctgccctactccttgatgcgcagctgttggtactgcgggtcggccttgatctgggcgtcggtgaagggcagcgggcgcagttgtttttgggagaaggcttgggtctggtccttggcgtgtggggaagccgggttggtcgactcggagaacgcgagaatgccttgggcatggggcccctggtcgtcgaaggtgacgatttgcaggtagctggtgccgctgaccacttcgcgcttgccgtcggcgcgcggcacggtttgcatggcgttgtagatgccgagttcctgtgggccgccgtggatcggggtttgcccggagacttggatgtcgccccaggtgctgttggcggtcaggcccaattttgcgacgtcggcggtggaggccagcatggcttcgcgcagggctttggcgacgtcggcgcggtcgatcgccaggccacgtggcgtggtgaggggctgggccgggtcgaaggccacgcgccaggcgtcggggatttgctgcaggtgctgcaccaggttgatgaagtgcaccaggccgagaccgctgtcgaggttggcgcgctggtcccaggttttcaggctggtgcacaggggttgcaaggcagtggcgtcggtgccgaggtgtttggcgcagaactggagcaggtcaggcatgacttggccggccaggtacacctggttgtccatcaccatgtcgtgcaggtcgctgacgctgatcggtttagccagcgattgcagacgttgcaaggcgaaacgcgcacgcgggccgaggccgatgtggtcctggctgatcaccggggagaacccgctgagtggcgcctgggggttagccagccatgccgagtcgttggagtgctgcacgtagtctgtgcgttgcagttgcggcagttgctcggccgggaagatgccggcctgggcagcgcgcgggtcaacgtcccaggcgcaggcgctgtgggcgccgtcgagcatgatcatctgcaggccggcgcgtggatcgctgcattgtgccagcttggccgcgctgacattgggcaccaccgacaggttcatgtacaggctctggccctggtcatcggcggccagggtgttgacccacgggatgccttgcagggtgtgcaccgaggttttcaattggtcgaggctgccggcacggttcatcgcgtaccactgttgcagcacacggtcgttgcctaggttggcgtcgcgcaggctgaaggcgtagtggctgtcccaatcgagcttgcccggccactgcactaccgggccgaattgcgagctatagaccgtgtgcgattggtccttgaggctgccgtcggcttgtttgacctgcaccgtcaccgtggttttatccagggcgaccgatttgccgtcgagcaggtagcgcgtcgagtccttggggtcgagggtcaggcggtacagggtgaagtgcttggacgtgtccaccgtgtgggtccaggccacatgctggttaaaaccgatattgatcaccggcaggcccggcagcgcagcgcccatcacatccagctggccggggatggtcaggtgcatctcgtaaaaccgcatgccgcccacccaggggaagtgcgggttggccagcaacatgccgcgcccgttgaacgagcggtcacggcctactgccacggcgttactgccgcgatcaaaagcgaagcgctgttggttcgcggcagccatttcaaaagccttggcagtgctcgcaacgttggccgttgcttgaggcggcatcgcacccaccagggcttcggcgaattggccgacaccaccttcgaccaatagcctgcgggtcagcttgacaaggtcttcagccaccagcggccgtacccacgccgcctgacactgtgcaggcgcgccctgctctttcagataacggttgtagccggccacataaccttcaatacgctgctggatctgcgggctctgcgccctccagaacgcagcgaccgcgtccggcgtattgagccagccaaagaacaggtcactggccaggttgttgcgctcctccagggtcgcctgttcggggccaaagaagcgggcgcgctgaccatttacggtgaccacttcattggccagcaggcacaggttgtcctgggcgtaggcgtagccaatgccgaagcccaggccccgctcatcgttggcgcggatatgcggcacgccgtaactggtgcgccggatctccgccgatgcttgcgtcacctgctcccgcgcagcggcagccaggctcacgcccagcaacaccccggccacacacaccctggacaacccattggaaataatcacgcagactccaccgtcagatttaaccgcctcacaaggggcaataagcccaccgtaagaacgcaaaccaccaggaataatttagcgcgcagggtcgtttatttaaggcgatgcgcaggtgacaaaaccgatactgacgaaatttctacatccgacacttcatgattttgctcgctcgttcgtcttatcaactaagagcactcattttttcctgatcaggctctgataaggagtttttgcatgtacaacccgcaagtgcccacggatggacattcacaaatggccgaggccagtttcggcagcggcccgcaagcgttcggcaaagcgcccgaacagcacggcaaccagcgcatccgccatctgctcaagtgttttggcttgcgtaccagcctgatccggctgaaggtcatcgacgccctgctcaccgctgccgacaaccaacgcaccctcggcgtgcgcggcgtgcacagccatttgctggagctgggcattccgttgtcgtttctcagcgtgcgcgaagtgctcaagcgcctgtgcagcgagggcgtgatcaccctcaatgcggacaaaagctacagcctccatgaagaggctgccaaggtactcgaaggccgcgcctgatcgcctttagagcttgaccttgcggcgcatgatgccgttgatcaccaccacgaccactgcgacggcaatggcgatggtctggaatgtcttctcactgatgacgccggtgttctgcaagtaggacaggccaaacatcgtcgccaatacggtcagggcaatcagaatcgaatatttcaaacgctgcttttgggtcatgacgggttcctgaacctgaaaaatgtagccactgtgaatcgccggacctgccttacgcacgatggcgagcaggtccgacaggcgctcatgttacaggcgcgggaatactttggctcggtcaatcagccagcatgcacccagcgctggtgcagccaccgcgcaaacgcatcgagcgcaaaccccagcaaaccgatcagcaccaccatcgccatcagctccgaataagccagccgatcacgggtatcgaggatgtaatacccgagccccgcactgacccccagcatctcgcacggcaccagcacgatccacaaaatgccgatggccaagcgcacgcctgtcagcacatgccctaccacgccgggaatgatcacccggcgcaaggtctcccagcgggtcgcactcaaactggcactcaattgcaaccagcgtgggtcgagctgacgcacaccggcagcggtattgagcatgatcggccacacagcggcaaaggccagcaggaaataaatcggctggtcgcccacgcccatcagcatcaccacgataggcatccacgacagcggcgagatcatgcgcagaaactggaacgccggcgtggtcgctgcctccagcttgcgcgagctacccactagcagccccaacggcacgcccaccagcaaggccaggaacagtccgacgaagatgcgcttgaggctcagggcgacatgcagatacagctccccgcgcccgagcaattcccacaggctggcggcggtggcggacagggaaaagcgtgccgacaagccgtccgccgcgccaaacactttcacccccaaccaccagagcaacagcaaccccgccaagccactcaacccgagcaaccagcccgggatttcacgcgtgttcaaacgccgatctcctcatgccgctcaaagccatcaggcaaaccaaaggtcttcataccgcccacggactcgatggcgttgcgcacgaagcggtcgtccaccaggtccttggcgacaaatgccgggtccaggtcggcgaggaatttcttgtcgccctcgatcaacgtgtccttcaggcgacgcaccagctcctcggtgtagctggggaatgggtagggttggaagtcgatgcggtgctcatcccaattggcgtgctggatcgcgccgtccgccaggtaggccgcacggtcggcggcggccggtgccagcactttgctcaacaccggctcggcgtgtggggtgtagcggttcggaccgtccttggacagcagcttcactgcctcttcgcggttgtcgcgggtccagacctgagccttgacgatggcattcaccaccttctgcgaccactccgggcggttggtcaggtcgttctcgtgcatgaacaccacgcagcacgcatggttgcgccacacgtcgccggtgaagcgctgcacgcgaccgaccttgaggttttccgccagggcgttgaacggctcggcgacgatgtagccatcgatgcgctggctggccagggccggtggcatgtccgacggtggcaacacgatcaggttgacctcattggccgcaatcgcactgcccgccgcccgcgccaccggcgtgaggccgttgtcacggaacagctgctgcaccaccacgttatggatcgaataccagaacggaatcgccaccgacttgccgcccagttgcttcacgtcagtgatgcccggcgccacggtcaagcccgagccgcccacatggttccacgccaccactttggccggcaccttgctgccatagcgtgcccatacggtcatcggtgacaacaagtgaatcacgttgacctggcccgagatgaacgcctcgatcacctgcgcccaactgcgcagcagcaccgggcgctcggccttgatgccttcggcttcgaacaggccattgttatgcgccaccagcaacggcgtggcgtcggtgatcggcaggtaaccgatgcgtacgggggcgtccggctcgctggcggcgcgggcctgcagactgctcagcagcggcaaggctccggcggcactgagcacggcggagagtttgagaaagtcgcgacgcgagtgggtcaggtcatccaggcacatgggcaggctccagcaggtcaagtgagttgggttgggggcggctcgcctgccgtagggttttaaggatatcgatgcgcagcgcgccgatggcttccacctgttcttcgcgcggttgcggcaggtcgatcagccactcgcccaacgtccgcgccgggcggttgcccagtagcaggatgcggtccgacaacagcagcgcctcgtcaatgtcatgggtaatcagcacggccgccgagccttgctcgcggttgactttgagcagcaggtgctgcatgtcggcgcgggtcacctcgtcgagggcgccgaagggctcgtccagcaacagcacctggggctggcgcgccaggcaacgggccagtgccgtacgctgggccatgccgccggagagctgcgccgggaagtgctggcgcgcatgctccaggccgacggcggcgatggcgtggtcgacacgctggcggcgttgctcaacgctcaagtggggttgacgagcgaagtccaagccgaaggcgacgttcttttccaggctcagccagggcaacaggctggggtcctggaaggccaccgccacgcgcggatgaggcccatccacgggttctccgagcacccgcacactgccgccctgcggcgcctgcaaaccggcgagcacccgcaacaggctggacttgcccaccccgctggggccaaggatcgacaccacttcaccgggctgcagttgcaggtcaaagccctgcaacaccggcccgccggcataccccaggcaaatcccccgggcgttcaatacggcgttcgtcataggttggcctggcgctgcaactcggtgcgcaactgcaccaggctcggggtcacgatgggcacaaacgcggactcacgccagcgccgcgcaaaaccactgccgtgggcggtgaggtaggccttgccgccgctggcctgcaactccagttgcacggcgctggcagccgtttcggccagggcgatgcgcagcttgaacaacggcaccggttcggccgcaaagcgtccggccaacaggccgttcttcagctcggtgaccaggtgatccagcgtcacgcgtagcgtttccagttcttcgcgcaacaccgtacgggtcgcgcccagatggttggccacttccgccagggaacgccgggccaggccgatggacatgccgcactgcaaccccaggaacgccgggcgcaccgccggcaaaaacttgcgtgcatcttcatgcagcaaccagtcgcgactcaactccacgccttcgagccccagggccgcggtattgctggactgcaaacccaatagttccaggtcgcgggagcgctgcaggccggccaccgagtccggaatcgccaggataaacggcgcaccacccccgacctgctcgatggcagccgcagcgacaaaaccgcttttgcgcaggttggtcacccaatgcagccggccgttcagggtccagccgtcgtcagtgggttcggcgctgatctgcaaggcctcgataccggacaagaacttcatcgcgttggacaaccccgtggcccccgccaatttgccgctgagcaggtccggcaacagtcgctcacgtagccgcgcattcgggctttgcagcaaatattcgatgaacgaacgctggccccagcacacaaacgccgccgccagggaatggctggcaacattggcgatggcctccaccgcacccgccacatccccgcccaggccaccgagttgagccggtacgccgatacgcaatacattggcctctgccagccgtggcagcacttcctgtggatcgcaactgcccacgtccagggcctgcgcttgaacatcgagccaacggctcaagattgggtcaagcattcatgtttctccttttcacagcgggtgagccatcttcagcttgcgggtttttcccagcggtattgcgccagctccgggttcaacggggtgcgcgcaaacacgttagcgaagttgcacagggttgccaggctcacgcccaaaataacttccagtgcctggccctgggtataaccggcggccaggaacgcgtcaaaaccggcatcgctgacatcgccacgggtagcgatcacttcgcgggtaaacgcggcgagtgtttcgtagcgggcattgggcagttggccacgttggcgcagggcgtcgatgacttcttccggcaatttggctttgttgcgtgccacggcagtatggccggccacacagaaatcgcagccgtgggtggtggccgcaatcaactgcaccacttcgcgatcggccaggctgagttcggccttggcattcagcccggacacggtgatgtaggtctccagcgccgccggggcgttggccagtactgccagcaggttggggatgaagcccgagcctttcaacgcattttccaggaagggcttggccgcttccggcgcggtttcaggggtgagcaagggtacacgggacatggaggggtctcctgatgggttcgtgtaaccagtctgttggttataaaaaatcgtctcaataggctaaagtagcgattacttgctcttgagtctttccattagatgaattcgtccagtgcacttgtcgattggttattagacagcctcgaactcgacaccagcctgttccatgtgggccgctattgcggcgactggcatgccagcacccatggcctggcaagcgcgagtttccacctgattgtgcagggccagtgctggctgcatatcgagggcgacaccacgccgcatcggttggataacggcgacgcggtgttcctgttgcgcgacctggagtatcgcctgtccggtgagcccacggctgccggcgcccacgaatgcccccgtgtaccgatggagcccctggacagcgccgcccacgacggcgtcggcctggtctgcgggttcttccactttcagtccggcttgtcggcgatgatcgtcgacagcctgcccgcctggatcatcctgcgcgcaggcgacccttcgctgacggccgcgcgcaacctgttcgaactgatcctgcacgagtgcgagcgcgtgccggcgccctcttcggccctgcttgaacggctgtgccacctgctgttcctgtatgtcctgcgccagcaggtgctggacaaccgtgaactcggcggcctcgcggcgctggcccggcaaccggcgttcaccaacctgctggagcagttgatcgcccaccccgccgacacctggaccctggagagcatggccgcctgtaccgggctgtcgcgctcggcgtttttcaaacgtttcaatgaactgtgcggacagtcgccgggccaagtgctgctgatgatgcgcatgcgccatgcctgccagctgttcaagcaggaccagaccgtggcggatgtgtcgctggccgtggggtatcagtcggtggcggcgtttacccgggcgtttcacaaggtcaccgggcagcagcctggggcgtatcgcaaggcccaggcctagcgctgcaaaccagtgccgggccgggcgcaaagctcgatcagccagtctacaaatacgcgtactcgctgggacagttggcggtgtggcggatacagcgccgacagggccattttcggcaccgccaggctgggcaatacctgcaccagggtaccttctgccagttgacgcgtcgcgtggtaagccggcgcctgaatcaagccgaacccggcttcacaggcagcgaagtagccatcggaactgttcaccgccaagccttttgacaggttgaacgtgcgcaattggccgtcgacttcaaactccaggccaaagcgtttgcccgtgacgctggagacgtactcgaccatctgatggttggccaggtcctccaacgatgccggaataccccggcgcgccagatataccgggctcgccaaggtcagttgatccatcatcgccagaggccgtgccaccagcgattcatccagggccaaaccaccgcgcagcacgcaatccacgccttcacggatcaagtccaccgggcggtcgttcagactgatctccagttcgatgtgggggtagcgggccgtgaatgtcggcaatgcagggatcacgatcaagcgcccgatgcccgacggcatgtccacactcaaggtgccgcgcgggttctggcgttgcgtggaaaacaccgcctcggtttcctcaaggtccgacagtaattgcacacagcgctggtaatacgctgcgccatccagcgtcgggctgacttgccgcgtggtgcgctgcaacaattgcacgcccaggtgtgcctctaattgcttgatcaacaccgtgaccgaggcgcggggcagttgcaggctgtcggcggccttggcaaagccacgcagttcgacgatccgggtgaacacgcgcatcgcgttgaaacggtccaaggggcggttccttgcgctgattatttagatattacgaatagtgttagtgcttttagccggtttatcgcagttttgtcgagcgtgacaatgcaggccttcccacccaaggagcaacacccatgcatacccgccaactcggtacacacggcccactcgtctcagccatcggcctcggctgcatgggcatgagcgatttctacacccccggcagcgacacccgcgaagccatcgccaccctgcaccgcgcactggagctgggcatcaacttcctcgacaccgccgatatctatggcccgcacaccaacgaaacactgatcggcaaggccatcgtcggcaagcgcgaccaggtgttcctggccagcaagttcggcatcgtgcgtgacccggccaaccctgccttgcggggtgtgaacggccgccctgaatacatccgcaacgccatcgacggcaccctgcgccgcctgggtgtggagaccctcgacctgtactaccagcaccgtatcgacccggacgtcgccatcgaggaaaccgtcggcgccatggccgaactggtgcaccagggcaaggtgcgttacctgggcctgagcgaagcctccgccgccaccctggaacgtgcccacaaggtgcacccgatcagcgccctgcaaagcgaatactcgctgtggagccgcgaccaggaacataacggctgcctcgccacctgccagcgcctgggcatcgcctttgtgccctacagcccgctgggccgtggctttctcactggcgcgctgcaaagcccggacgacttcggcgccgatgactaccgccgcttcagcccacgcttccagggcgagaacttcgccaagaacctcgaactggtcaaacaggtgcaggcgctggccgccgacaaaggcatcagcgccgggcaattggccttggcgtgggtgctggcgcagggtgatttcatcattccgattcccggcaccaagcggcgtaaatacctggaagagaatgccgccgcgctgtcggtcagcctcagctcgagcgaactggcggccctggaggctatcttccccgccgaggcgcccgctggcttgcgctaccccgaggcggtgatggccatgctggatatctgaatcgaaaccgcgccgctcaccggcgcggttttttcttgcacgatagtacctaaagctccgccctgccaggccgatagccctacgaagctctaacaaagccgcgtcgataataaacgcttcgtaaggacgaccccatgcccccactgcgctccatccaagcccgctataccctgttcctggtgctgttcgtcctggtgttattggtgttgaccgtagtgggtatcggccagttggtcgcgcccaaactgcagcacaccgaagaacaggtggtgctcaaccgtatcgccgaggtcgccgagcagatccagggcgaactcaacaaggtccagtcccagcaacgcagcatcacccagaccgttccattgctcgacagcgatgccatcgacaaggtcctgccgggcctggtcgaccagtatggcgagctgaaagtcttcggcggcggtatctggccgctgcccaaccagcgcactccggggcgcaacaagcacagtacgttctggcaccgcgatgcgtcaggcaagctggccgtgaacaccttctggaacagcgacccggcgcccaactattacgaccagagctggtacaagggcggcctcgcctcgcctcgtggtcaatgtgcctgggccgccgcctacaaggacgacgccagccaggagccgcgcaccaactgcgccatggcgatccagcgcgacggcgtgccctacggtgttgcaaccatcgacgtgaccctgggcttcttcaatgacttggtcgccagcaaagagaaagacatcggcgggcaaatgctgatcgtcgaaggcgacggcaagatcatcagcaacagctcgcgcatcagcggcccggtggtgttgaaaaacatcagcgaactcaccggcacctcggcgtttgccgcccaggtcagcaaagcgctggcccaccgcgaccaggcgctgcaacgcaatgagttcgacaaccagggcgtggccagcaccttctacatgcgccctatcgaaggcaccccgtggttcctcgccaccgccctgcccacctcgctgatcaccgcccagcgcaatgacgtgctcggcaccctggcgctgttgcagatcccgatggtgctgctgctggtgttgctcgcagcgtatgcgatccgccaactggtgcagcgcatgaagacgctgaaaaccaatatcgacgcactctccgccggcgacgccgacctcacgcgacgcatcaccatccgcgccgaagacgaactgggcgccatcggccattcggtgaaccgctttatcgtctacctgcaaaacatgatcggcgaagtgacccaggctaccggcgccatgtcgtcgagcctggcgcagttgcaacagacctcggcgcataccaaccagatcctggtgcggcatgcctcggagactgaccagacggtgaccgccatcaccgaaatgagctccaccgccgacaccgtggcgcaaaacgccgccgaaaccgccgcattcacccagcgcgccaacgagcatgccgaccgttcccgcgtggtcgtcggtgaggcgtccaacagcgtcagcgcgttgatcggtgaagtctccagcgccacccacagcgtggagaacatgcgccaggacgctgcgcgcatcaccgaaaccctcggcgtgatcggcgcaattgccgggcagaccaacctgctggccctcaatgccgccatcgaagcggcgcgggccggcgagcaaggccgtggtttcgcggtggtggccgatgaagtccgtgcgctcgccgcacgcacccaggccagcacctcgcagatcaacgacatgctcacgcgcctgacggcaggcgtgagttcctcggtggcggccatggaaaacacccaggccagttgccagtcggcggcggacgccactgcgcgggtaaataccgggttggatgaaatggccggctccgtcagccacatcaacaacctcagcacccagatcgccacggccgccgagcagcaaagcgcggtgaccgaggagatcaaccgcagcatggtgcagatccgacaaatggtcgaagagctggtgcagagcggccacgctaccgaaaacaatacccagagcctgctggaggcgaatggtcgggtgattaccttgatgggtcgattcaaggtgcgctgataaacggctgagacactcccgtgcaatgtgcgggagtgggactattctgacagttccaagacgcacaggaggtgtgccatgcgcgcagccgagcagtcggtccgcttggagcggatcagtcaggaacgttttatccacgctcccatcgatgccgtttatgactatgtgacccagccggatcgctggcacgaatggcatcccacgtccctcggtgccgacaccggcaccaccggctctctccccgccggcgcccgcttcaccgaaatgatcgacctgctgggcgtacgcgtccccatgagctaccgcgtgcaaatcgcccggcgccccggcgagttcaagaccgtgtttacgtccctggccgtggatggttcgattcattacttcctcatgccccaccagggcggcacactgttcaagcgggtgctgacctatgaaaccgaactgcaactggccaccctgcatgaacgcatgatcgagctgtcggcgattgccctggaccagctcaagcaccggctggaaaacccaccgttcgtataatcttgaaacattctcgccgtgcaggcgctggcttgcctgcgatgacgtcgtcatgatcgccgccatcccaatggtcacctcctgcacgcgagatcctatgaaaaccccattgcgcctggccctgctgtcaaccctgttcaccgccaccctggcccaggccgctgacctgatccccatcgacgtgcaccgcgacgccaactgcggttgctgtaaaaaatggatcagccacctggaaaacaacggcttcaaggtcaatgaccatgtcgaagccgacatgagcgccgtcaagcaacgcctgggcgtagcgccgcgcctgggctcgtgccacaccgccgtgatcgacggcaaattcgtcgaaggccacgtgcctgccgaacaggtgttggccctgcgcaagcgcgacgacctgctgggcgtcgccgcatcgggcatgcccatgggctcgccgggcatggaagtggaaggccgcagcgaggcctatcaggtcatcggcctgacccgtgagggtaaagacgtggtggtggctgaatacccggcgcaatgatcgcgggttacctcgggcttttcttcgcggcgttcggcgccgcgaccttgctgcccctgcaatcggaagcggtgctggtcggcctgctgctcagcgggcattacagcctgtggctgttgctgggtatcgccaccctgggcaatgtgctcggttcggtggtgaattggtggctggggcgctgggtggagcacttcaaggggcggcgctggtttccggtgaatgaccagcaactggacaaagcccgcaagcattaccagcgctgggggcattggacgctgttgctcagttgggtgccgatcattggcgacccgctgacgttggtggccggggtgatgcgcgagccgttgtggcgattcctgttgctggtgaccctggccaaaggcctgcgttatggcgtgctggccgccgtgaccttgcaatgggtgttaatccccacttaatcgccagttaatccttgggcaacagcatccgaaccctctttctcggagccctgcccatgcctctgttccgcgctttttgcatcgccggcctgctcacggccaccgccgccccggtatttgccgccacctacggtcctgaactgcaaggctttgaatacccctatccgctcaagcatttcgagtttcagtcccaaggcgaatccctgcaaatgggctacatggacgtgccggccaatggcaagcccaacggccgcagcgtggtgctgatgcacggcaagaacttctgcggcgccacttgggaaggctcgatcaaggccctgagtgacgccggctaccgcgtgatcgcaccggaccagatcggcttctgcagttccagcaagcccgatcattaccagtacagcttccagcaactggcgctcaatacccaccaactgttggaaacgctcggtattcagaaggccacccttatcggccattccaccggcggcatgcttgccacgcgttacgccctgatgtaccccgcgcaaaccgaacagttggcgctggtcaaccctatcgggctggaagactggaaagcgctgggcgtgccctcgctgagcgtcgaccagtggtatgcccgtgaactgaacgtcagcgccgagggcatccgcaagtaccaactcaatacctactacgtcgggcgctggaagccggagtacgagcgctgggtagacatgtacgccggcctcagcaacggccccgggcatacgcgggtcgcatggaactcggcgctgatttacgacatgatcttcacccagccggtgtactacgagttcaaggacctgaagatgccgacgctgctgctgatcggcacatcggacaacaccgccatcggcaaggacgtcgcgccaccagccgtcaaagccaagctcggcaactatgccgtgctgggtaaacaggtggccaagctgatcccccgcgctaccctggtggaattcccgggcctggggcatgcgccgcagatggaagaaccggagcagttccacaaaacgctgttgcaggggctgaatgccctttaatccaaactttttcgaggcactcgtgaatgtcggtacagattgcagtcattgatgattggcagaatgtggccagtggcgtggtggattggtcagtccttgaagcggtgggccaagtgcacttcctgcacgactacccggcggataccgccacgatgatcgagcgtttgcgggagttcgaggtgatttgcgtgatgcgcgagcgctccagcttcgacaaggccctgctgcaaggtctgcccaagctcaaattgctggtgaccggcggcatgcgcaacgccgccatcgacattcccgccgccaagaccctgggcatccaggtctgcggcaccgacagctataaacacgcagcccccgagctgacctgggcgttgatcatggcctccacccgcaatctggtggccgaagccaactcgttgcgtgccggcgactggcaggtggggctcggcggcgacctgcacggcaagaccctggggattctcggcctgggcagcattggccagaaggtcgcgcaatttgcccaggtgttcggcatgcgcgtgattgcctggagcgaaaacctcacgccggaacgggcagtcgaggttggtgtgacgtgggtcagcaagcaagcgctgtttgaacaggccgacattctcaccgtgcacctggtactcagcgagcgcagccgtgggctggtggatgcccaggcgctgggctggatgaaacccggcgcgcgcctggtcaacaccgcacgcgggccgattgtggatgagcaggcactggtgcaggccctggaaagcggccgcctgggcggggcggcgctggatgtgtatgccgaggagccattgccggcggatcacccgttccgcaggttaccgaatgtgctggccaccccgcacgtgggctatgtgagcgagcagaattaccggcagttctattcacagatgatcgaagacattcaagcctgggccaaaggagcgcccattcgcgtgctgggctgacgcaccatcccagggcgctccgcacaagcgcggcgcccacccgaccttgtagtgagcaggcttgccctgcgctggggcgcgcagcggccctgaatatcggttcaatcttcgaaagtcccggttgggagcgcttcgcactccagcgcagggcaagcctgctcaccacagggtccgctccaccctggcatatggttacaatttttttgtcctacaaaatcttcctagaaaccctacaggctctgggatctgtcctagactcatgaccgatgggtccgttccaaaacaaaaaccccgcagaaaatctaaacttttcaactcggccattggtcaagttttaaggtacgacgagcgcacacggttccagcccgatgcccgtccatccaatctatatctgccaaccgtgcaactggcataagccttgccagatctgtacagcgcttgtgcgcgtggccgcaggatgcggtcgacggagttaatggcagccggccattagccgaccaacacgtggagagaactatgatcagtgccgcagcaagtattcagggagagcgtgttagtcagaccgttggcggggcaaccgcgttggctgacctcaccacggtgcggccggttcccacctacaaccccaaccgcaagaaagtcctgtttgtgacctccgagttcgccgacctggtgaagaccggcggcctgggcgacgtctccgccgccctgccccgcgccatggcccacctgcacgatgtgcgggtgctgatccccggttatccgcaggtgatggaaagcgacaacccgatccatatcatcggtgagctgggtggccacgccgcgctgccgccgtgcaagatcggacgcatggacctcaaggatggcctggtcatctatgtactgatctgccccgagctctacgagcgcgaaggcacgccgtacggcgccaacaacggccgcgactggccggacaaccatattcgcttcgcccgcctgggcctggccgccgccgacatggccgccaacctggcgcagatccactggtgcccggacctggtgcacgcccacgactggcccgccggcctggccccggcatacatgcactggcgtgggtcacgcacgccaaccctgttcaccattcataacctggcctatcaaggcgtgatcagcctggcgtcgacgccagagctgggcattccaccccacgccctgcaacaggaaggcatggagttctacggcaagatgtcgttcctcaaggccggcatggcgtattccagccacatcaccacagtgagcgccacctacgcccgggaaatcaccacacccgagttcggctgcggcctcgatggcttcctggccagcaagacccagcaagggttgctcagcggtattcccaacggcatcgaagacagttgggaaacctccaccgacccgcacctgacgcacaacttcaacattggcgactgggacggcaaggcggtcaacgccgcccaggtacgcaacctgttcggcctgcatgattcgagcggcccgctgttcgccgtggtgtcacgtctggtgttccagaaaggcctggaccttaccgaagcggtggccagctttatcgtcgagcaaggtgggcagatcgccattatcggtcgcggcgagccggaagaagaaaacgccatgcgtgaactggcgctgcgctttcccggccagatcggtgtgcgcatcggcttcaacgagaccgatgcgcgccgcatgttcgccggcagcgatttcctgctgatgccgtcgcgctacgagccctgcggcctgagccagatgtacgcccagcgcttcggctcgctgcccgtcgcccgcaacaccggcggcctggccgacaccatcgaaaacggcgtgaccggctttctgttcaatgaatccacggtcgacagttacaaagaagccttgagccgcgcgttcaaggtgtttgccttccctggcctgctcaatgccatgcgcagccgggcgatgacccaaccgttcaactggagccaggcggtggaaccctacgccgaactgtacgagcagctggtggctaaagcactggggaaatccgctaaataatcaacgggaggtctctatagatgccgttacggactctggaaacctggccccacggcgcaatcatgctggacgcgcaacacacgcgtttcgccttgtgggcgccagacgcattttatgtcagcgttgaattggaacacggcaagtccatcgccatgctgccccaggcagatggctggttcgaaaccgaaatagcgtgcccggcgggcacgcgctaccgcttcaatatcgatggggaaatggatgtacccgaccccgcgtcccgcgcccaggccgccgatgtgcacggctggagcgtggtggtcgactccctcgcttatcactggcgccacagcacctggcaaggccgcccctggcacgaggcggtcatctatgaactgcatgtcggcgccatgggcggttatgccgccatcgaaaagcacttgccacgcctggccgagctgggggttaccgcaattgaactgatgccgctggcgcaattccccggtgatcgcaactggggctatgacggggtcctgccctacgcgccccaagcttcctacggcacgcccgaacagctcaagcacctgatcgacagcgcccatgagcacggcctggcggtgatcctcgacgtggtctacaaccacttcggcccggacggcaactacctgggccagtacgccaagggtttcttccaggaagacgtgcacacgccctggggcgccggcatcgatttcaatcggcgcgaggtgcgcgactttttcctggataacgccttgatgtggttgctcgaataccgcttcgacggcctgcgcctggacgccgtccacgccatcgacaacccggactttctcaaggaactggcacaccgcgtgcgcgagcaggtggataccggccggcacgtctggctgatgctggaaaacgaactcaaccaggccagcctcctgcaacaggatttcgacgcgcaatggaacgatgacttccataacgtcctgcatgtgctgctgaccggcgaaaccgacgcctattacagcgacttcgccaaggagcccacggccaaactggcgcgctgcctgggcgaaggttttatttatcaggggcacaccacccggcacgggcatgagcgtggcgaacccagtgggcatctgccgccgagcgcgtttgtggcgttcctgcagaaccatgatcagatcggcaaccgcgccctgggcgagcgcctgcatcaactgtgctcgccacaggcactgagggcggcgaccgcactgctgttgctctctccgatgatcccgctgatgttcatgggcgatgagtcgaatgcccgcgagccgttcctgtttttcaccgatcaccatggcgaactggcagaagcggtgcgcgaaggccgccgcaatgagttcaaggatttcgccgcgttccaggacccggaacgacgcgagcgcatccccgacccgaatgccctgccgacctttttgcagaccacgccgaacttcgacgacaacgaacacacccagctgtatcgccagttactcagcctgcgccaccgtcatatcgtgccgcacttacccggcagtatggccctgggcgccgaggtcttggccgaaggcgccgtgagcgcccgttggcgcctgggcgatggcagcctgttgcagattgacctcaacctgagtgccacgccgctggatcagccggcgacggcgcctgtcctgtttgaaacgcctgccagtaccggcgcacacctgccgccgtacagcgcacgcgtcaccctatcccctgttggagagcacccttgagcgaagcgaacctggaaatcctcgccagccgagcgggcctggccgtcgattggatcgacgcaaacggccgcccgcaacaagtgaaacccaacgccctgcgcgccgtcctcaaaggcctgggccaccccgccgacaccgatgccgaggtcaacgccagcctgctggccctggaacaggtgcaacaagacaaacacctgccgcccctgctgaccatcgacagcggcgcaggcctcgacctggcgcgctacttcgaaccggacaccctgtgccgggtcagccttgaagacggtgaaaccctggagttgcgcctcgatggcgacgcggtcctgcccggcgtcatcgccctcggctaccaccaagtgcacattgccgaccagaccttcaccctggccgtcgcccccacccactgctacagcgtcgccgaagcggtcgacaaccgccctgcccgcgcctggggcctcagcgcgcaactgtacagcttgcgccgcctgggcgatggcggcttcggcgacaccctggccctggagcacctggcccgctcggcggccgagcgcggcgccgacgccctggcgatcagcccgatgcatgcgatgttcagcgccgacaccgcgcgttacagcccgtactcgccctccagccgcttgttcctcaacagcctctacgcgtcgccgggttgcatcctgggtgagcgcgaagtgcgcaacgccatcgaggccagcggcctggcggatgaactgcacgacctggagcaacacagcctgatcgactggcccactgccgccaacgccaaacagcgcctgctgcgtgcgctgtatgaagacttccgccatggccaccacccgcaacacgccgacttccagagtttccgccaggccggcggtgaggccctggaaaaccactgccgtttcgaagccgtgcaagcgacccgcgccgctgccggtgaagacctcgactggcgccactggccagaagactggcgcacgccgcagagcccggcattggcgcggttcgccgaagaccaccgtgacgagatcggctacttcgccttctgccaatggctgatcgcccgttgcctggagcgcgcgcaacaagccgcacgcggcagcggcatgggcgtcggcctgattgccgacctggcggtgggcgccgacggcggcggcagccaggcctggagccgccaggatgaattgctcgccgacttgaccgtgggcgcgccgcccgacatcctcaaccgcgccggccagggctggggcatttccgcgttctcccccgaaggcctcaagcgccacggttttcgcgccttcatcgaaatgctgcgcgccaacttcgcccacgccggcggtttgcgcatcgaccacgtgatgggcctgcaacgcctgtgggtgatccccatggacgcctcgccgcgtgacggcgcgtacctgtattacccggtggacgacctgctgcgcctgctggccctggaatcccaccgccaccaggccatcgtgctcggtgaagacctgggcaccgtgccggacggcctgcgcgaaaaactcatcgcccgctcgatcctgggcatgcgcgtgttgctgttcgaacagaaccacgaaggccagttcaagccgatcctcgactggccggacaacgccctggccaccaccagtacccacgacttgccgaccctcaacggttggtggcacagccgtgatatcgaatggaacacccagctcggcctgatcgatgcgcccaccgtggagcaatggagcgagcaccgcctgcgcgaacgccaggcactgcgccaggccttgagccaggacccgcagaacttcgtcgaagagatccgcaatgaaaccgaccacatgatcgacgccagcgtacgctacctcggccacacccgcgccccgctggtgctgctgccgctggaggacgccctgggcgttgaggaacaagccaacctgcccggcaccaccgacacccaccccaactggcgccgtcgcctgccgggtgaggcgtctagcctgctcgacaatgccggcgccgcccgccgcctcgaactgttggccgtcgcgcgcaaccaagcctatgagcgtgaccgatgaaagccctgcccctgcgcgccacccagcgcctgcaattccataaaggttttaccctcgatgacgcggtgccgctggtgccgtatttcgcccggctgggcatcagtcacctgtatgcctcgccgctgctcagcgcccgcgccggttccatgcacggctacgatgtggtcgaccccaccacagtcaacccggaactcggcggcgagccggccctgcggcgtctggtcgcggcgttgcgtgaacacgacatgggcttgatcctcgatatcgtctccaaccacatggccgtcggcggtgccgataacccctggtggctggacctgttggaatggggccgcctgagcccctacagcgagttcttcgacattcagtggcactcgccggaccccttgctcaaaggccaattgctgatgccgttcctcggcagtgactacggcgaagccctgcagaccggcaccctgaccctgcacttcgatgccgaccacggcgcgttctacgtcgagcattacgaacaccgcttccccatctgccccaaggattacgccgcgatcctgggcaccgatgaatcgctcaagcccctggccgagcgcttcagcgccctcgcctaccaggacgacgcctaccacgaggccgcgtggctcaagcaagcgctggccgagcgcgccaccgaggtgctcccggcaatcgaacaacgtttgacggccttcgacgggcgtcagcccgagggcttcaaacgcctgcatcaattgctcgaacaacaggcctaccgcctggccagttggcgcacggcggcggacgatatcaactggcggcgcttcttcgatgtgaatgaactcggcggcctgcgcgtcgagcgcagcgctgttttcgaagccacccacggcaagatcttcgaactgatcggcgaaggcttggtggatggcttgcgcatcgaccatatcgacggcctggccgacccacgcggttattgccgcaaactgcggcgccgcgtggactcgctgtcgcctgagcggcacttgccgatcttcgtcgagaagatcctcggcgaaggcgaaaccctgcgcgacgactggcaggtggacggcaccaccggctacgagttcatgaaccagttgtcactgctgcaacatcacccggacggctttgcgccactggctgcgttgtggacccgtcacagcgaacggcctgcggcgtttatcgaagaagcgcaattggcccgccagcagatcctcaacggctccctcggcggcgacttcgaaagcgtggcccaggccctgctgcaagtggcccgcgacgatgtgatgacccgcgacctgaccctcggcgccatccgccgggccttgcaggaactgattgtgcatttcccggtgtaccgcacctatatcagcgcccgtggccgcagtgccgccgacgacaggctgttccagcaggccatggacggcgcccgcacgaccctgggcgaaggcgactggccggtgctcgaccacctggccaactggctgggtggccagccgtggcgcaatcgcccggtgggccgtgaacgcaagatcctcaagcacgcctgcgtgcgcttccagcaactcacttcgcccgccgccgccaaggccgtggaagacaccgcgttctatcgctcggcggtattgctgtcgcgcaacgacgtgggcttcagcaccgagcagttcagcgcgcctttggccgacttccatggggtcaaccagcaacgcctgcagagctttcccgacaacctgctggccaccgccacccacgaccacaagcgcggcgaagacacccgcgcgcgcctggcggtattgagtgaatgtgcgccctggtacgtcgagcaggtcgagcagtggcgcgccctcgccgcaccgctgaaggcggaggcaaacacgccatcggcgggcgacgagttgatcctctatcaggtgctgctgggcagttggcccctggaccagaccgacgacttcgagggctaccggcaacgcctgtggcagtggcagcaaaaagctctgcgtgaagccaagttgcaaagcagctggagcgcgcccaacgaagcgtatgaacaaggcgtcgaagccttcctgtcgcggctgctgctcagcgatgaaggccacacgttacgcactgccatcggcgccgctgcccaggccatcgcgccggccggtgcgctcaatggcctggcgcaatccttgcttcgcatgacggtgccgggtgtaccggacctgtaccagggcgatgagttctgggacttcagcctggtcgacccggacaaccgccgtccagtggatttcaacgcccggcaacaggcactggataccccaccggacatcggcgaactgttgttcaactggcgcgacgggcgtgtcaaacaggcgttgattgcccaggtgctgggcttgcgcaaggcctgtcccgagctgttccgcaacggcacctacacaccgctgcaagtgcacggcaaacacgccgaacgggtggtcgcgttcgcgcgtgaataccagggcaaacacctgctggtggtggtaccgaggtggccgcaggacctgcttgaaaacggtgtgcatccaatgatcaatgcgcaggtttggggcgatacgcgggtgaaattaccgttcgccgcgtcaaccaaaaactggaagggactttttcatacaggcgcagtcacaccagacaaggagctgttgatcagcactgccctgggggatttcccggtcaatgtctttatcaatcctgatgatcaagaaagctgaaaattctctgtgaggagcattgcgatgagtactgacgaaaaacgcataaaagagttggcgcaccagatctgggagtccgaaggcaagccccatgggcaagacgcgcggcactgggagatggcgcgcaaactggccgaagccgaagcgctgacgccgagcaaacccaaggcccccgccaagcccaagccaccggtcaaagccaagccggccgcgagcaagccggcgccaccggccgctaaaaaaccacccgccgcgaagaaacccaagccttaatcccccacctcttgtcggcgctgtcggcaagaggtgattccacctaccagactctcagctgaaatttcgtcggcacggccgcgttcggcctgaagaaagacccttgcaggagcaactcaatgagcaaacccgataaaaccccatcgacgccgggcaacgaaccgtcgcgaatccgtgaaggtttgcccttcccgctcggcgccacctgggatgggctgggcgtcaacttcgccctgttctcggccaacgcgaccaaggtcgagctgtgcctgttcgacgacaccggcgaggtcgagctggaacgtatcgaactccccgaatacaccgacgagaccttccacggctacctgcccgatgcccatcccgggctgatctacggctaccgcgtgtacggtgcgtacgacccggccaacggccaccgcttcaaccacaacaaattgctgatcgacccctacgccaagcaactggtgggcgaactcaaatggtcggaggcgctgttcggctacaccatcggccacccggacgacgacctcagcttcgacgaacgcgacagtgcgcccttcgtgcccaagtgcaaggtgatcgacccggcgcacacctggggcaacgaccaaccggtacgcgtgccgtgggaccgtacgatcatctacgaaacccacctgcgcggcatcagcatgcgccacccgtccgtgggtgaagctgtgcgcggcacctgcgccgggctgatggaagacgacgtgctcaaacacattcgtcagttgggcgtgtcgtcggtggagctgctgccggtgcatgcgttcgtcaatgaccagcacctgctgcaaaaaggcatgaccaactattggggctacaacagcatcgcgttttttgcccccgacccacgctacctggccagcggcaagatcgccgagttcaaggagatggtcgcgcacctgcatgagcagaagctcgaagtgatcctcgacgtggtctacaaccacaccgccgaaggcaacgagcgcggcccgaccctgtccatgcgcggcatcgacaacgcctcgtactaccgcctgatgccggacgacaagcgtttctacatcaacgactccggcaccggtaacaccctggacctgagccacccctgcgtgctgcagatggtcactgactcgctgcgttactgggcgacagagatgcacgtcgacggcttccgcttcgacctggcgacgattcttggccgctaccgcgatggtttcgacgaacgccacagcttcctcgtcgcctgtcgccaggacccggtgctgcgccagttgaaaatgatcgccgaaccctgggactgcggccccggcggctatcaggtgggcaacttcccgccgggctgggtggaatggaatgaccgcttccgcgacaccgtgcgtgccttctggaaaggcgatgacggccaattggccgacttcgcggcacgcatgaccgcctccggcgagatgttcaaccatcgtgggcgccgtccctacagctcggtgaacttcatcaccgcgcatgatggtttcacgctgcatgacctggtgtcgtacaacgacaagcacaacgaagccaacgacgaaaacaatcaggacggcagcaacaacaacctgtcctggaaccacggtgtcgaaggcccgaccgacgacccgcaaatcaacgccctgcgcctgcgtcagatgcgcaacttcttcgccacattgctcctgtcccaaggcacaccgatgctggtggccggcgatgaatttgcgcgcacccagcacggcaacaacaacgcctactgccaggacagtgagatcggctggatcaactgggacctggacgaagacggcaaggccctgctcaaatttgtgaagcgtttgatcaagctgcgcctggcctacccgatcctgcgtcgtggacgcttcctggtgggcgactacaacgaagacatcggcgtgaaggatgtcacctggctcgcgccggatggcaacgagatgaccaccgaacagtggcaggacagccacggtcgctgcctgggcatgttgatggatggccgcgcccaggaaaccgggattcgccgtcccggcgccgacgctaccttgctgctggtggtcaacgcccatcacgacatggtcaacttccgcttgccgccggtgcccgaaggtgagttctggacctgcatgctcgacaccaacgagcccgccgtacgcggccaggaacgctttgagttcgatcacgagtacgccgtgaccggccgttcgctgttgcttttcgagctgcagcgcgaagacgaggtgtgagatggctctgcatggattccttcaaggcttccggggctatgcggacacgcaagccctgggcgacgccctgaaggcgcttcaggaagaaggcctggaccacctaccgctgcccggcggcggtcagaccctggcgcggttcagtcgcctggcgcaggtggcgggtcatgacctgcgcctgtgcaagctgttcgaaggccacaccgatgccctggcaatcattgccgagctcaactccccactgccgcccttgggcagcacgtggggcatgtgggccgccgagccgccaacggccaaggtgcgcgtgcaccaggagggccatcgcctgcgggtgcaaggccgcaaggcctggtgctccggcgcggcggtggtgagccatgggttgttgaccgcctgggacgaagacgatcgccagcagttggtggccgtgcacatggatcaacccggcatcgtggtcagcgatgaggggtggaacgccgtgggcatggcagccaccggcagtgtggaggtcgtgttcgacggtgcctgggggctggcggtgggcgggccgggagattacctcgcccgcccagggttctggcaaggcggtatcggtatcgccgcctgctggtacggcgccgcgcagcgcctggctgaggtcttgcgcgcgcagtgcagtaaacgcccggaaccccacgccctggctcatctaggcgccgtcgacagcgcactgaacagcgccgcctgtgtgctgcgtgccagcgcggcacagatcgaccttgagcccaaggctgatgcccggcaattggcccagcagacgcgggcctgtatcgaagacaccgttgagcaggtgctgcgccacgtcgggcgcgccgtcggtgcgggtccctactgcaaggacccgcactttgcccagttgatggcagacctgccggtgtatgtacgccagagtcatgccgaacgcgacctggccgggctcggagagctggtggccggtgaacccacagggaggtggcagttatgagatccaatccgatcgttggccagggcacgccgctgcatcactggcaggcctcgccgaaaatggccgacttgccgtcgatcagcgtcgagcagttggtgcccgccggccaccgtgcggtgatcattgcaccgcatccggacgatgaaatcctcggctgcggcggcctgatgcagggcctggcggcgctgggtcggccgatccaattgatttcggtgaccgatggcagcgccagccaccccggctcgcagcgctggccagtggagcgtttgagcgtggtgcgcccgcaggaatcggcccaggccctgcaccgcctggggttgccgctgcacagtttgaaatggctgcgcgccggttttaccgacagccaggtggcggcacgcgaagctgacctcgtggcgtttatccaacgctacctcaagtctaccgacgtggtgttcaccacctggcgcgaagacggccattgcgaccatgaggccgtggggcgtgccagcgcccaggcctgcgcggcggtcggcgccaccctgtatgagctgccggtgtggacctggcattgggcaacacccgaagacagcgtggtgccctggcaccgtgcacgcaagatcccgctgacctgtgaggccgtcgctcgcaaacggcatgccatccacgccttcgccagccaactggaaggcgacccgcagatcggcctcgcgccggtgctggcgccctacgtggtggagcgtctgttgcaaccctttgaagtggtattcgtatgagtgtggccacgccttatttcgaccagctgttcgccaataacgatgatccctgggcctttcgccaacgctggtatgagcggcgcaaacgcgcactgaccctggcgatcctcacgcggccacgctacgcctcggtgttcgaacccggttgcgccaatggcgagctgagtttcgaactggcaccgcgttgtgaccgcctgctgtgctgcgacaccgccgcggccgccgttgacctggcgcgcactcgcttgctggggttcccccaggctcaggtgcagcagtgccgcttgcccgaacagtggcctgcgggccagttcgagctgatcgtattgagtgagtggtgctactacctcgacgccgatgacctgggccaattgatcgatcacgcccgcaccgcactgaccgccgacggccaattgctggcctgccactggcgcgcgcctatcgacggttgcccgcaaacggctgagcaagtgcacgccctgctccagcaacgcctggacatgccccgcatcgccagccaccacgaacctgatttcctgctcgacctgtggagccgcgacggcacctcggtcgccacccttgagggcctgcgatgatcggcattctgatcccggtacataacgaagaggcgttgctcggcgactgcctgaaagctgcgatgatcgcggccagccatcccgggttgctcggcgaagcggtgactattctggtggtgctcgacagctgcagcgatgccagcgccgccattgcccaggcctacccggtgcagtgcctggaagcccaggtacgcaacgtggggcatgtgcgtggcgtgggtgcgcggcatttgctcaatcagggcgcacgctggatctcctgcaccgatgctgacagccgggtggcccccgactggttggtggcccaattggcgttgggcgtggacgccgtgtgcggcaccgtcacggtggatgcgtggagcgagggttttgatcccgccgcgcagattcgctacctccagggctacgaggctcgcgacggtcatcggcatatccacggggccaacctgggggtgagcgctggcgcgtacgtgcgtgccggtggtttcgagccgctggcgtgccacgaggatgtgcaattggtgcgcaacctggagctgtgcggcgcctccatcgcctggagccacggcccgcaggtgattaccagtgcgcgcctggacgcccgtgcacaagggggattcggcgattacttgaagagcctgatgcatgccacgtaaaaaaacgccgttaccgaatgtgaaaccgcgcaatccttgtctatgctgagaacgccttgctggcattccagggttggggtgccatgcagccactacggcggagcctgtggtggaaacaagagagtcgtcccgtcaacggggcacgaccccgcatcaaccgacaaggatgtgacaccccatgaagcttgcttccttaagcgacggccgccgcggccccgcgcaagtctggaacagcgccccgcagttggcgcaaatcccccccattacgccctcctcattagtgccgcctggcgcacgcgtggtgatcatcgcacctcatccgggcgatgaggtgctggcctgcggcggcttgctgcaattgctcagcacgctggaacacccgctgcagctgatctccatcaccgatggcagcgccagccacccgggctccaacgtctggccggcgagccgcttgagcgtggtccgcccccaggaaagcgccgaagccctgcgccgcctgggcatgccgctgcacagcctgaagtggattcgcggggggttttgcgacaacgccctcgccgcccgcgagccgcaactgagccaattcattgcgcgctacctgcagcccggcgatgtggtgttcagtacctggcgcaacgatggcaatgacgaccatgatgcggtgggccgtgccagtgccaaggcgtgcagcctggtgggcgcgcagctgcatgaactgccgatctgggcctggcactggccggcccgcgaaggcgcgatcatcccctggcaacgcgcgcgcaaggtacgcctggacacctggaccgtggcgcgcaaactccacgccgcccacgcctatgccagccagctggccggggacccacagatcggcctgccgccgatactggcccaggtgctgctggagagaatgcgcgaaccgtatgagatcgtgctgtcctgaaatccaactcgttcatacctgttaattctgacagtagcggcctggcgaatgtgtggctagggtggaaaaagcgctgcaccgcttcaggtgcagtcgagaaagccatgccaaccctttgcattggccggtgttttcagaaacggttaacccgctgtccctgctccgtatcgcgcatcacgttgtcatggtctggcccgcacctgccttcgcaggtgccgggacaactctcccctcaagtgaggacggatcatgcgcgcacggacactctcctggttgtacctgatcgtcatggcggtgtggccgccgggctcttatggcgcctgcaccatcaacagtggcgccggcgatgacacctccaactgtgacatcggcacggcgccgggctttaccgataacgcgggtaacaacacactgaatatcaccgcgacgggccgggtgaccggcaatgtgacctttggcgcgggcaatgatctggtggatgtgaatgggccaagcgccgggattgatgggaacctcaaccagggcgatggcgcgaatatctttcggctcaatctgggcagcattaccgggtctgtcactcaaggtgatggccaggacgtggcgcagattactggcggtcaagccggcgccgtgcgtcaaggagcgggagtcgacaacctttccatcagtggcgggactatcgcttcgctcgaacagggcgacggtctggataactttttcatgagtggcggtacgatcaccggtgcgtttgaagacggcgaccgagccaggatgagcggcggcaccatcggccgcgtcgacatgaaactcgataacaacctgttcgacatgtcgggaggccgcatcatcggcaacctggtgaccggcttaggcaacgacaccatccggatctcgggcacggcgtttgtgggcggcaatatcagtgtcagcgccggtgatgatcaggtgaccgtctcgggcggcgaggtgaacgggcagatcctgctcagtttcggcaacgaccacttcatctggaccggcggcaacctgcactcgtttgtgcggatgggtgaaggggacgacatggcactcgtgcagaatctgacgagtgctcagttggcggcagcgcaattggtggacggcggcctgggcaacgacaagctcaccctggacaacaccaaggccggggatccgggcctattgcccaactgggaagccatccagctggacaatggctccgaactgacgctgagcggtacgaccctcaagctgggtgacagcagctccggtactggcacgctggcgctggatggcacgagcaagctgctggtcgggaccggcgtcatcgaagcctttaccgccggccagttggttaccgtcagcaacagcggcgtgatcgacatgaccaccggcagctccagcaccagcgactcattgaccatcaggggcaattacaccggcaatggtgggcgggttgaactgcaaagtgtgttgggcggcgacggctcgcccagcgacaaactggtgattgaccaaggtgccattgggggcagtacaacgatcagcgtgaccaacctggggggtgcgggtgcagcgacgctgcaggatggtatccaggttgtgcaggcccttaatggtgcctccggcagtgccaacgccttcaccctcgccggcccggtctccgcgggtgcgttcgactaccgcctgttcaagggcggtgtaaccgcaggcacggcaaagaattattacctgcgctccactgtcccggtgcagccaccaggccctgagatcatcgtacctttaccgagcccgggcgagcctcccccccctaaaccagggcccgatccaatccccatctaccgcaaggaagtgccgatctatgccgcaatgttcccggcggccgaccagatcgtgcgcgccacgctgggcacttatcacgagcgcatgggcgaccagaaccttcgacagagcagccatgcgctggacggctggggccgggtctacggcagcagcagccgtcaagggttcgccggcacggtgagcccgacgctggacagcacgctcgagggcttccaagtgggcagtgatgtctacaccaccaccgacgacagcggacgcaaccagcgcgttgggctgtttgtgggccacagcacactcaaaggcaacgtcaagggcttcaacggtggctggcaagacctggacgccggcaaaaccaccttgcgcgccgatagcctggggatttactggacactgatcggggctaatcaagcgtatgtggatctggtgctgatgggcagccggttcaacggcaacaacgaatcagaccgcggcgtgaagatgaaaacccgagggcataacatcacagcctcagctgaagtcggctggccgctccgggccagccaaaactggacggtagaaccgcaggcccaagtgatcgtcggcaagacaaggctcgacagccagaacgatggcatttccgacgtcaagtatgacgccgataccagcgtgacctcccgcctgggcttaaggctgcgcggcgactacaacatccatggcatggcgtggcagccctatgcgcgcgcgaacgtctggcatgccagcgccggggacaacagtgtgatttacaaccacacgacccggatcgataccgagcagaaatccaccatccttgaagtcagcctgggcgccaccttgcaggtagcgcccgatgtgagcctgtatggcgaagtcggctacaaccgcaatctggacagcaacacctacaacggccgcgaaggcactgtgggtctgagggtggcgttctaggtttgtatcgcagtgtgtacacagcccactgcgatacacagcctttaactcggcgggtttcctgaaacaggccagatacagcccggcgttcaactgagcacccggcacacatccagccgcaggaggctcgccatgcagactcagttgaaccgccgttccacacccctttttctggcctttgccctggcgcaattcggcatcctgggcatggcccacgccgaaatgcccgaggctgcgaccaaagttgtcgccagtacccaaagcgccttcggtgccctcaagcacgtcaaggctgggctgctggacgtggcctacgccgaagtcggccccaccaccggcccggcggtgatcctgctgcatggctggccctacgacattgacagctacgcccaggtcgcgccgttactggcggccaagggctatcgcgtgttgatcccttacgcacggggttatggcgatacgcgtttcctatcggctaacaccccgcgcaacggccaaccggcggcgctggccagcgatgtgatcgacttcatggacgcgctgaagatccagcaagcggtgctcggtggctatgactggggcgcacgctcggcggacatcgtgtcggcattgtggccggagcgggtcaaggcgctggtgtcggtcagcggttacctcatcggtaaccaggcggccggcaagaacccactgccgcccaaggctgagttgcaatggtggtaccagttctacttcgccaccgagcgcggcgccgccggctaccagaaaaacacccacgacttcgccaagctgatctggcaactggcctcgccgcagtggaagttcgatgacgccacgttcgatcgcagcgccaaaggcctggagaacccggatcacgtagcgatcactgtgttcaactaccgctggcggttgggcctggtgcagggtgaaacgaaatacgacccgctggaacagagactcgcccaggcgccgtccattggcgtacccaccatcaccctcgaaggcgacgccaacggcgccccgcacccgcagccggaggactacgccaagcgctttaccggcaagtacgagttccggctgatcaacggtggcgtcggccacaacctgccgcaggaagcgcccgaggcgtttgccaaggcggtcatcgatgcggatcacctgtgatgaagcgcctgtgcatggccgcattggccctcgcgagttcggctggcaccttcgccgacagcgccccctcgccgatctacggcgtgactattcccgacggctaccgccaatgggaactggtggctccggcccaggaagccgacccgttgaacgagctgcgcgtggtgctgggcaacagcgctgcgctcaaggcttatcgggagggcacgttgcctttcccggatggcaccgtcctggccaagttggcgtggaaacacgagcagtcaccggatttcaagaccgcgtccatccctggcgcggcgaccacggtgcagttcatggtcaaggactcgaaaaaatacgcgtccaccggtggctgggggtttggacgcttcatcaatggcaaaccagccgatgaagcgcagcaccagacgtgttttgcctgccaccaggcgttggtgaaagaccgggattatgtcttcaccaggctggcaccctgaaagccagcccgttcaaggtctctggtcagaactggcgacaaataccctgtggcgagcgggcttgttgtggtgagcgggcttgccccgcgctgggctgcgaagcagccccaacaccggcagccgaagagtacctgattcaccgcatgcctccttccagggtcgcttcgcaacccaacgcggggcaagcccgctcaccacaaatgggagggtatcagccagatatggccggtttttcaaagactttgaaagggctgaccctgaaagcgcgaaaactgataggcgattcccagccagatgaaccaggccggcatcacgcacagtgccaggcgtgtatcagggcgcaacgccagcaggcccagcacaaaggcgagaaacgccagggcaaaccaggccattggcacaccaccaggcatcttgtaggtggattgggcgtgcaggtccgggcgttttttgcggtaggcgatgtaggacgcgaggatggtcgaccaggtgaagatcaccaggatcgccgacaccgtcgacacgatggtgaaggcggtcatcacctccggcaccacaaacagcaacaccagccccagcaacatcagcaagctggtaaacgccaggctgataaacggcacgctgctgttcgacaagcgccggaagatccccggcgcatcacccaggtcggccaaaccgaacaacatgcggctggcggaaaacaccccgctgttggcagacgacgccgccgaggtcagcaccacgaaattcacgatgcccgctgcggcggggaaaccggcgaccaggaacaattcgacaaacgggctcttgctcggtgacacctgctgccaggaggtcaccgcgataatgcacgccagggccagcacgtagaacaggatgatgcgcagcgggatcgagttgatcgccttgggcaaggtcttttccggcgcacgggtttcggcggcggcggtaccgatcagctcggtgccggcgaaggaaaagatcgccatctggaacccggcaaaaaagccgaacaggccgttgggaaatgccgcttgtttatccaggaggtggctcaacgaagcggtgacgccggtgggcgaaacgaaggaactggcgatcagcaccccactcaccccgatcaaggtcacaacggcgatgatcttgatgatcgcgaaccagaactccacttcgccgaacagcctgaccgtcagcacattcagcgcgaacagggtcagcaacatcgccaccgccggcatccaggccggtacatcggggaaccagtactggaagaaaccgccgaccacaacggcgtcgcccaccaccgctacgctccagctcaaccagtacgaccagccgagaaagaacgccgcacgcggccccaggtaagcaccggcaaagtcggcgaagctcttgaagttgaggttggacagcagcagctcgcccatggcgcgcatcacgaagtacacgaacagcccgatgatcatgtagatcaggatgatcgaggtgccggacagcgcgatgatcttgccggagcccatgaacaggccggtgccgatcgcgccgcccatggccatcaactggatgtggcggttgctcagggtacgttgcaacgcaggctgttcacacagcccgggcgtggttgttttcatcacaaaacctcttgttatgtttttgagttttggcagaagaaaagtcgaggggtcgttgttattggctgtggcgttcgaaaccgtgcagcacgttgaccgcattgatgccgatctcatcaaccatgtagccgccttccatcacgaacagcgtgggcacgccgacggtggcgatgatctcgcccatgccgaggaagtcttcgctgtcgaggaggaagtggctgatggggtcgtccttgaaggtgtcaacgcccagggagatcaccaacacttcaggcgcaaagcggcgcagttgctggcaggcgtctatcagggcggttcggtaatgggtccaggtggtgtttttcggcaacgggtagttcaggttgaagccctcccccgcaccgacgccgcgctcgctgccggcaccggaaaaatacgggtaagacaccgtcgggtcgccatgcagggaaatgaacatcacgtccgggcggtcatagaaaatattctgggtgccattgccatggtgaaaatccacatccagcaccgccacacgcgtggcgccctgggtgatggcgtgctgtgcggcaatcgcggcgttgttgaggtagcagtaaccgcccatgtattcacgggccgcgtgatggcccggtgggcggcacagggcaaaggcgctgtgatggccttcgtcgagcaacgccaggccggtcagtgcgatgtcggcgctggtcttcaccgcctgccaggtggtgcgggtaatcggcgaaccggcgtccatcgcgtaaaaaccgagcttgccgtcgatgaacgccggcacctgctggttggccaggtcgcgtaccggccacaccagaggcaaggcgtcatggctgcggccgatggcagtccattcggcccaggcggtttcgaggaacgccacgtagcgttcgctgtgggcggcgacgtagcaggcccggtcaaaacggcgcggcgtgatgatatcgcccagcccaacctgacggacccgatcacgcacggtgtcggcgcggctgggttgttcgaacgagggtttgagcacaccgtccttgagttcggtgccatggtgcaaacggtgggcttcgctgaaaacagtcaacatgtgagggcatccgccagtaaaagacagggtctattttgttctggcggcagtgggctttctttgcttttacttacggcactgttaggtttatcgggaatatttacctcattggcgcacgattatgaaaaataaaaccaaacaggtcgttcttgatgataccgatctcgccatcctcgccctgctgcagcaggacgccagtatttccaacgctcagctgagtgagcgcctgtccctgagcctcacgccctgctggcgccggcgcaaacgcctggaagaagaaggcgtgatcaaggactaccaggccaacctcgaccgcaagatgctcgggctggacatcctggcgttcgtgcatgtgcgttttgcgatccacaccgaccatgcgcccgacgccttcgaggcggtggtgaaagaactgccacaggtgttgtcgtgccacaagatcaccggggatgccgattatttgttgcaggtactggctgaagacctggacagctacagcgagtttgtcgagagcgtgttgcggcggcagttggggattgcctcgatacagtcgagcctggcgctgagggaggtcaaggcgaccagtcgagtggcgattccacagcgcgaataaccgcgcttttcgcggggcgatgtggcaaatcgccgccactgagatgtgaaaaattcgttaactgtttctccctcaaggctttttcctacaagaacaatctgccagactaatgcgaataattatcaacagattttttattcgccagggacggcgttcggggagagtcagttccatgtctgtgcaacaacacggcagtaaaggtttttcacccagtctgatagcgttggcggtctgtctggccagttcatccgcggtctttgccgccgatacccaggcgccggccaccacgcttgaactgggcgccacgcaaatctctggcgaagagcaactgggcgaaaccaccgagggcacccagtcctacaccactggcgcgatgaaaaccgcgaccaaactgccattgaccatgcgcgaaaccccgcaggccgtcaccgtgattacgcgtcagcgcatggatgaccaggcgatgaccagcatcaacgatgtggtcaaggccacgccggggttgttcctgaatttctccagcggtccgggccggcagtcctatacgtcgcgcggcttcgacatcgacaacctgatgtatgacggcatccccagtggctataacggtgtgtcagtgggcgcacagccgaacctggcgatgttcgaccgcgttgaaatcgtgcgcggcgccaccggcctggtcaccggcgcgggcaacccttccgccgccatcaacctggtccgcaagcggccactggacgagcagaaagtcaccctgaccggcgccgccggcagctgggacgactaccggggcgaactcgacgcctccagcccactcaacgacagcggcacctggcgcggtcgcgtggtcacctcgtaccgcgatgccaacagcttcatcgacaacgccgaggagtatcacggcctgttttacgccgtcaccgaagccgacctgagcgaagacaccaccctgacccttggcttctccaaccaaaaggacaagaccaattacttctggggctcgtcgatggtcggccaggatggccatcacctgaacctgccgcgctcctacaaccccggcaccgactgggaaaacaaggaccaggagatcaacaccgtattcgccgagctacgtcagcaactggccaacgactggaaactgcaagtcaacgccaactatgccgaacagaacgcgctgttctccggctcctaccagtcgcgctgggtcgccaacacactggcgcgcaccgtctatcaagcggcctacgatgaaaaccaggcgggtgtcgacgcgtttgccagcggccccttccaggcgttcgggcgtacccacgagctggtggtaggcgccagccggcgcatctacgacatgaccacccacaactacagcccctacaacctgaactggccgctcacggcgggcaaaccgaacttcgtccacaccaccaatgaccgcgacgtgaccacccaggacggggtgtacgtcaccacgcgcctgaatctggctgacccgttgaagctgatcctcggcgggcgcctggactggtatgactacgatgcccacggcagcaacaccggcgactacaaggtcacccgcaacctcacccgctacgccggcctgatctacgacctggacgaccatcactcggtctacgtcagctacagcgacatcttcacgccccagagcgaaaaggacacctccggcaccccgctcaagcctatcgtcggcaagaactatgaggtgggtatcaagggtgaatacctgggtggcgcgctgaacgcgagcgtggcgctgtttcgcgtcgaccaggaaaaccgtgccgtcggcgtgaccgtcgcaaactgcccgcaggcctcctgctccgtggcctccggcgagattcgcagccagggtatcgacttcgaactgcaaggcgccttgaccgagaactggcaggtcggcggtggctacacttatgcacgtacgcacaccatcaaggacgcagccaacccgcagaacgtcaacaagcagttcgacaccgacaccccggagcacctgttcaagctgaccaccaactaccacttccagggctcgctggaaaaactccgcgtgggcggcaacgtgtcctggcagagccgcatgtacaacgacttcaaagtcgcggatggcagcacctaccgcctgcagcaaggcgcctatgccgtcaccgacctgatggccggctaccaggtcaaccagcacctggacctgcagctcaacgccaacaacatcttcgaccgccgttactaccagtccatctccaattccgtgagctatggcggtgattcctatggcagcccgcgcaatatgatgctgacggcaaagtacagcttctgattcacggcggcgccctcctcaaagggcgtcgcacagcgaaccagaacccgaatgccgacctccgcgagcatgaaaatgcgctatgttatcgggctcataccttcaagattgataccatgcacatcacacgcttcgacatcctcccgtacctgacatccacccttggccttgaaaaaaacgagatgagcgacctgggctcgctcgtggtcctggtcggtgaaaatggttgcgggaagtcgcggctgctcgaggcggtcgactggctgctgcgtcgcacacaccaggttgggtacgctcaattgctcaagatcgacgcaggccgggcaaaacaaaagcgccactccgacgctatgctactgggagccgaagaccacatctcatgctcagccgctgcgtcggattgcgaagcgttcgataaggtacttgtgcctcttgactgtttgaacttcagcagtacgggcgacgaagacatcgatgtggcactgtccgcctattgcgcactgtccgacatactgcgcaacccgacgatttcaaaaggggggcacttcacgcgtctgtcggtcggcgcgccgcgcggcgatggcctgacggattcactacttgctggaactccactcgcttacatcgatgacgtctgcgtgcgtcaggctgcggcctcctccgacgaatcgatagggatgtacagcccaaaccgcatgattgaggacgactacgctcgcctgaaagaagtgctcaacgaaatcactggcatgcacttggatgtcattggcgaaaatgcctgcatcggcggtcagcgtattgatcgtacgacgttttctgacgggcagatggcgttgctgcgtattgcagtgctgatccattctcaggtgctgaaggacgttgaactgccgatcctgcttgatgagccggagcgtcatctgcacccttcgcgactcatcggactgatcgacgccctccgtaagcacctgccccgcgcacaattgtggattgcgacccacaatcttgcgctgacagcgcatctggcggccatagagccacgcgcaatctggttcggttcgaaggggctattcgagcgcgccggcctagcgcaggaaaaggtcatcaacggccttctgggaggggcaaccggcgcccaacagatcagcgatttctgcacgcgcgcggaccagttcgcggcatgctcgttctctgcggactgcctctatccacccgataccgtcacctataaaaaagatgatccgcaaatccagcagatccgcgacttcatcaccggagggcgtactcgtcccatggtcatcgtcgacattggtgccggacaggcgcgtttactcgacggtttggctcatttgctcaatgactctttgctaaaggacgtctcttactatgccatcgagccgaacgacgccacgcgggcattgtgtgctgaaagggtcagtcggcacttcaacgacgggagtgtacgcgtgttcgccagcgcaaaagatctcctcgcatccggccctatcaaagccgacgtcgcggtgctggcgaacgtgctgcacgagattgagctcaagtactggaaagcggtgttgctcgatgcgcacacgctcctgaaggacgatggatcgttgctcatcgtcgaggacacacggctgccgcgcggagagctggcccacccgcacggctttcttatcctcgagaccgacgccctgtgcgaactcttcgcaacctgcaaggacgcacacggcgttcagcacattgccgcgacacgcggtggcgcccgactacaagccaccgcgttcaaacgaccgctactggcggcgttgactacctcatccatccggagcgccttgcacctgcaaaaaagtagcgcggcagccagcattcgcgaattgcgtaagtctggccggcaacctgactaccgtctcggtcaagaacatgcctaccacacgcaactgcttgccaacctcacgctcgcccttgaagacttggcattaggtcgctgagccacaccgaaatgaacgcccgaatcctggagacgggcgttcaatgcacattaggatgaggcctgtacctcatctggcccaattcctgcctccctccatcccaccaagtcgctgctgactacgcggacgactcttttgagccccgccgcccaagcgcctgcgccgataatcggtcatcccccagctatcccgaggccttccccccatgacgagcccctccaccgaacaggtcagtccgcaaaccctgcgcaaggtcatcatcgccgccggcatcggtaatttcgtcgagtggtttgacttcgccgtctatggcttcctcgccactactatcgcccagcaattcttccccagcggtgatgccagtgcagccttgctcaagaccttcgccgtgtttgccgtggccttcgccttccggcccctgggcggtattttcttcggcatgctcggcgaccgcatcggccgcaagcgcaccctggccatgaccatcctgttgatggccgctgccaccacgttgatcggcctgctgcccacctacgccgccatcggcgtcacggcgccgattctgctgtcgctgatccgctgtgcccagggcttctccgccggcggtgaatacgccggcgcgtgtgcctatctgatggagcacgcccccagtgacaaacgcgcctggtatggcagctttgtaccggtgtcgacgttttccgcgttcgccgccgccgcggtagtggcgtatgcccttgaagcgtcgttgtccgccgaagccatgggcagttggggctggcgcctgccgttcctgatcgctgcgccactcggcctggtgggcctctacctgcgctggaagctggacgagacgcctgccttccaggccgtgaagcaagagcacgcagtggctcactcgccgctcaaggaaactctgcgcaaccatggtgcggcgatctgttgcctgggcgcttttgtgtcactgacggcgttgtcgttttatatgttcaccacctatttcgcgacgtacctgcaagtggcgggcgggctgaatcgggcgatggcgctgctggtgtcgctgatcgcgttgatcttcgcggcggcgatctgcccgctggcggggctgtattcggaccgggtcgggcggcgtgtcaccgtgatgactgcctgtgtgttgttgatcgtggtggtgtatccgtcgttcctgatggccagctccggctcgtttgcggcgtcgattgtcggcgtgatgttgctggcggtcggcgcggtgttgtgcggcgtggtcacggcagccttgctgtcggagacctttcccacacgcacgcgctacaccgcttcggcgatcacctacaacatggcatatacgatcttcggcggcactgcgccgctggtggcgacctggttgatcagcaccaccggcagcaacctgtcgccggcgttttacctgattgccgtggcgttgctggcactggccggagggttggcgttgccggagacgtcgcggatttccttgcacgacgtgggtggtgaggaaacaagcactgcacctttgctttcacggtaaacggcaggagggtgaacgccgctggacgcaggtagaatcaattagacacctgcctgctgccgcatccagaccatggacagcgttttctgaaggcgccgcagtgaaccctgtggtgcgcatcggctaaatcgccgcagccatgcgcgctctagaaccccaggcaaacgtcacgaccatcagcaaccccaagcccgccatcgccgcgccggccagggaaatcgccgggtagcccaaccctgcgttgatcactgcaccccccactgctgcgccaatcgcgttgccgaagttgaaggcgccgatgttcacggccgaggccaggttcggcgcatctttggccgcttccatcacacgcatctgcaacggcggcacgacggcgaagctggcgataccccagatgaggatgctcaccgctgccggtatcggccaacgcatcaggaatgcaaaggccagcaggaccagaatcagtgcgctcagcgagacgatcagggtccggtcgatcgagcgatctgccgccttgccaccccatatattgcccagggtcaacccgacgccgaacagcaccagcatggccgtgataaagggggtagacgcatgggtctggttgctcaggatcggcgcgatgtaggtaaacacggtgaacatggcaccggaacccaccacggtcagggccagtgccgccagtaccgaaccacgccccagcaccttgatttcggccagcacaccgtcgcttttcggcagcggcaggtcaggcagcgcgaaccacagcgcgaccatggtcaccaggcccagcccgccaatgccccagaacgctgtacgccagccaagcagttcacccaaccaggtcgccagtggcacgccaccaatagtcgccagggtcaggcccataaacatcgcggcgacggcgccggcgcgcttgtccggcgcaaccacactggccgcaacgatggaacccacaccaaaaaacgcgccgtggttgagcgaagtgatgacgcgggcaatcaacaggtcgtaatagccggttgcaagcgccgacatcacgttacccagggtgaaaatggccataagcccgaccagcaagtgacgacggggaatcttgccagtggtcaggatcatcagtggcgcaccgagcaatacccccagggcgtaggcgctgaccaacagccccgcagtgggaatcgaaacgccaaggtcattggcgatggtgggcaacatgcccatgggcgcgaactcagtgacgccaatgccaaaggcaccgacagccagggctacaaggggtggattgatacgcatggaagactcctcatttatgccgcaaatgctacgatcaacgctttaacggcactagaccgtttaattggcaatcacctttgcgcgcgaggcaaaaatggatttcaacggcaggtcgggtgagatggcggtattcgcaatggtggcgcaggaaggcagcctgtcggccgcagcgcgggcattacgcttgacgccctcggccgtcagccgcgtcatcgcacgcacagaacaacgcctgggcacccgcctgttgattcgcacgacccgcgccctcgccttcacagccgaaggcgaggcgtacctgcgcggcgcccggcgcatcctggccgacatggcggaagtcgaagaagccatcgccgaccagggcgcgcccaaaggccggctacgggtcagtgcggccctgggccacggccgcatggccatcgtgccgttggtggcggcgttcagcgcccgctacccaaacattgtggtggacctgaccttgggcgacgaagtggtcgatatcctcggcggccaggctgacatcgcgatccgctttggcgacctgccagacagcccgctgaccgcgcggcgcatcggcgacactggccaggtcctggtggcgtcgccggagtacctcgcgcaacacggtacacctctggaacccaacgacttgctgcgccacaactgcctgcgcttcaacttccgccgcgcccaatccgactggcccttcgcccgtgacggtagggagttttccctgaagataaacggcaatatcgaatgcagcagtggcgaagccctcgctcaactggcgcgattaggcgccggtattgcacgtatcggcgagttcacggttgcacaagacctgcaacgcggtgacctggtgcgcctgctggaatcctggaaccccggcgaccgggagccgatccacgtggtgtttgtcggcggcgcgagcatgccggcgcggatccgcgtgtttgtggactttttgctggagcatcaccggctataaacgcgcaggcttgtgcagccgctcaagcacctcgtcagctgcctcgcgccatgcctgcgtcgcgcctttgttcctcaacaccgccaacccagccgccgtaaaggtgcccggtgtcgcaatcgcgctacccaacgcttccagactcgcggatggctggtggcgggcactggccagacagtcttgcaggttgcccatcaccagttgggcggcctggtccttggacaggcctttgtcggtaaaccactgctgaagatcgctcaggaagaaatagaaccagccgttcatgcaggccgcaacagtggccagttcgaacgcctcttcctcgtccaatacaaccaatgaaccgagcgcgcccagcagcgttgcatggggttcgccaccgggcgtgaccaccacggtcgtctggttgatctgcgcggcgtaggacagcatggcgcgcaccacacgcgcttgcgggaagcggcgctgcaactcggccagcttcaatcctgccaccaacgacaccagcgattgctcaggtctgagctgcacttcattcgaaagctgatcgaccacctccgggcgcacgcccaggaccaacaagtccgccccatcgaccacctgttgattgtcagccatcacctcacagtcccactgttcagcgagttgctgcgcacgttggtggttacgcggagacagcagcacccgcccgccaaacccgctgcgccgcaggccgatcaccaccttttccgtcagctcaccgacgcccaggattccaatcttcagcacgctgtccactccggtcagttctgtagtcgggtgcatcatagacatgattcccgtcttcatgcaggcggacgttcacgctacactcgccgctcgaaaagatcagccaggaaggcaagcatgagcactcaaggtaaagaccggcaaatcgacaacatcgaattcaacgtcagcgatattgcccgcagcaaagccttctacggcggcgcgttcagttggacgtttgtcgactacggccccacctacacggggttcagcgatgggcgcctgacaggcgggttcaccacgggggagcctgttcggccaggtgggcctctggtcattttgtacgccgatgacctcaatgccacgcagcagcggcttaaagccctgggggctgtcattacccgcgagacgtttgcgtttcccggtggacgcagattccacttcacagacccggatggctatgaactggcagtttggaacgccggtcaataggcctcgacccgacgcctaggcgaaggcatcaatcgctctccctcaagccctaccctcacaggatatgaaggttacccatgcgttttctctttcccctggccctcagcctgacgcttatcggctgcgccaccactaaaaccgacgttcgcaacgaagcccaaatcagccaatacgacccggccaactcagcccgaatccggtttattacgggtgacaccaccaacgcgggtttcctcagcggccagacgtgcgagatgttttacaacaagtccctgctgacccaaacacccgaagaagccgggtggcaaaaagcccatgtcgactcggcggggctctacccgttcagggccactgacagccagaacagcgtgattggtatgcctgccagcaaggcgagcaaagccatcaaccaatcgcccaaagtgtttgacgagcatgtcattccagcgggtaaaccctttattgcagggttcgccatgggcggttcgcaaatgtcctgctttcccgcgcctgtcacgcttattcccgagcccggcaaagactatgaaatggaatttcagctggtcaaaatcagcacgttcaaggccggttgcgtgattgccgttcgccaactctctgttcaggacaacaacacggttgaaacaccgctaaggccgcaggtgtgtgccaaaacgccgtcgggttggtacaccgtcaccccgaaaccttcgccctgaaatgcctgggcaggacgccatagtcatcctgcttatcggacatcgcccagacctgggacccggcttgtattggaggaaaaatgcggatctacatcacaggtgcatcgtgcgcgggcgtcaccacactgggtcaccacctcgccacgcggctgggtatacgacgagtcgacgtcgatgacttttactggatgcccacaaacccgcctttcacaaccaagcgacctcccagcgaccgcgttgccctgatgcaacaagcactcggtgacgacgactgggtgctgagtggttcctgcatgatctggggcgatgcgttgatcgccgatgccgacctgattgtctttgtggtcacacccacgcccgttcgcctcgaacggttgacggcccgcgaaaaggcccgctttggcgatcggatcgcacccggtggtgatatgcatgcgatacacgtggccttccgggaatgggcttcgcactacgacgaccccgatttctcggggcgcaaccgtgggtggcatgaggagtggttatcacacatggcggccccgatcttacggatcgacggggctgacagtgttgaagcaatggttacggcagtcgttcattgggtatcgaaaatgtcgcaatagctggaaaccgtaacagacgaggcagctcaactgcctcgactgttctatttctatccgcccgtttcgcgatgccacaactgtcaattgtattttttgtagcatatatctatggcttgctgataaagcacctgacacgtgtcgtgggtgaataccccatttgaaatacaagcagagtgccgttgacttgcgcgatccgtacaaaccgacagaggcgttggtatatcggcgacttcctcagtaacgccatgtgattttgctgaattcacagggctcatagatttgttgagtgcttgaggtatctgttcaatcgtggggctttgaaagctactcgccaaaaagagaacgattgaagctgcttgccgcgcaggagaattggctggccaaagcttgaaatccaggagtacatcaccttgcttaagcgcgccatctttggtccaacgaataggtactcctgagccattttcgagggtacctttcgagtcgatgctaaccattggcgccccggctgagtcctccaaaatggacgtagcgcgcaagaccgccaacaaccttcctgaggtatcaacgactcgcccatcctggcttatcgttcccaaggctgttcgcacgtatttgaaaccttctgttttttcgtactcagtaatctccccttttttgtcgaccaatatgaaaaacataccgtgcttatctccaaccttgaaaggatggatctgaacgaccggtggggcgaacgatttgttatcgcaaccatgcgggccgggatcacactcaggaggtcttgcaaagcagaaaccacttgcaaacatcaacaagctcattgcgattgcggtgagcgttttcatgtgaaaattccttttaagcactgcgtaccggacgattaagtgtgttggccacgcggagaggtccagctttgccagacgcctcgttgtagtcgacaactcagctttacatcttcgataaggcgaattgaacaatagacgacgttggttgacgctgacgcgaatttttcatggtttcctatttcggtatatcgacgctgagagtctcaatctgcacacgtcaaccgcctgatacattgcgggcccaacgcaccggtcgtccaagcgtcgctactccccttatcctcacccctacccgcccccgcgaacccggagccgccatggacctcgccaccctcgcccttttcctccccgcctgcttcgccctgaacatggcgccgggcccgaacaatttgctctccgtgagcaattccacacgctacggctatcatctcctgtttggcgggcatcggccgcttgctggcctttgccggcatgatcgccctcgcatccgccgggttggcggtggtgctgcaaacgtcggagttgttgttctatgggatcaagattctgggggcggcgtatctgttttatctggcgtttcagttgtggcgggctaatccggaggcggaggcagattcggccacagagaaggtgggattgtgggcgttggcacgacaggagtttttggtgaccgcgggcaagcctcatgatcggtaatatgaaatctacacgcaggcatatatcggtcatttggtattaataaaagcagggatgaatctttggatattaaagagttttgcctcgctcatggattcgatatgagcaaatgtggggtagcgttgggcggtggtagtttcgaaatgactgagttgaaaatctcaccagtcgaatttctgaccttagcggaggatgattttgaacggggcggtttggcggctcttgtcaatgctacgaccaatgcaaaacgagctattgtctctcagcttgatcagttattgatctcttttggctatccttcatttcgattgaaggtgccaaagaagatcgaacggctaaaggcgctcgggttattggcgccaagtctgttgcgtaaagtcgtcgatatgcgaaatattcttgagcacgagtacacaacgcctgggcttaaaaatgttgaagaggcgttggatatcgcgagcctatttgtgatgtccgcttcagccatgttcattccattcgatgatgtcttggagttctcactccctgacctctttgtgacagagaacgctgtcactcacttttcggcgggactgaatcgtgagactgatagagttttctacactgtctacgcttataaatctggaagccatggacggagttgcgtcggtcagtgtgagattcaatcagggcatgtcctgttcgaggcgatggtgcagctttccgcgtcgctgatgcttcgctacaaggtgaaccaagctctcggcaattttgaagcggcgtatgcccagctataagtactcatttaattaatgttgtggctgtaaacggctgtaacccaccgaaaagggcgcgtccaagctggtggcatcaagcaacgttcaagcaaatctgctgatgggcaatatcacgtctcgtgaaagactcgatatctctacaaacccagcgaaattaaggtaagttcagaaaaccttttctcgaatctacggagcggataatggcgaatggaaacggagagttaagtcaggatttacacgcgcaaataaagaaattcagcggtgacggagatctgctggctgagtcaggccgctttgaagaagcgctagcccaatataacaatgcatgggcattgatcccctcccccaaaaatgattgggaggctgcaacctggatcctggcagctatcgctgacgcttgcttcctatctggatttaccacctcagcacgtgaggctttgcagtacgcaatgacgtgccctggtggtcttgggaacccttttttgcatctgcgccttggacaagttttacttgatgacgcacaaaatgaccgcgcagcagaagaactgatgcgtgcatacatgggggctggcccagagattttcgctgcagaggacgcccattacctgaactttctcaagacgcgtgctgatctttgacaataccgtaaccatgagctcctgcgtttacattcaagctactcagccccctaacgtgaatgcattgggtcgattaaagtcgtgcggtaggcaagccattcaagctagtcaccagcaagcccgataatgggcaatatgaaaccttctgtcaggctgctaccggccagaaccggttacctgtgcacgattgatgctctgtgtccgtcaacagcatctattcgatactaaccactctcgtagaatctaaatggccaccaaacgccctcaaatcaaaacctccgctgacattaacgagctgctgcttcactctaaggcgccgcggccactgacccctgagcagatggcggagctagagcgcatttcgaattacgatgtctctacctactcggagggagacgtccgagcggagatcattgaccccgtcatccgagtcctgggctatgccaaagagacctatttctccacgcagcgagaaaagcacctgaaggttggcgacggggacttgttcatcgactatcgaatgactttgtggtcgcaggccttttggatcatcgaagctaagaaggttaaacgcaagcagctgaaatttagctccgcagaactgcaacaggcacttctgtatgcggtgcatccggaaatcgacgctgctctcgttgtgctatgtgacggacgagtctttgaggtgtacgaccgcgatgagagtgtcacccagccagtcgcgcgcgtggaggtcaaaaagctaccggagcagttccacgtgcttcaggctctactcggtccgtggcaggcttggttcttccagaagcgccgcgcgctcaagctggccagccgtgtcctacagctggagatgacgcctggccgaattgaggagttttcggatgcaatgcagcggcgggtgcaggacgcgcgtgcgaaggtgtacgacaattggcgcaaggtaaagccctcaactgacaaagatgcgcgatggctcaactcgctggaacaggcatctatcggagatattgtcgcgaccgagttcttttcgggccagacagcgcaccgtctgggggttgtcgccaagtcgttggtggaaaaggcgaagccaggcgcgttcgaattgatgtacgcaatgtttccggaccatccaggaaacttgaacgacaactatgtggcacaggctttacgaactctcatcgagttcggcaagtcgggacgtgaggtcagttggatgcctgcttggcttggtgtccaacagcccggtgtcaatctggaggcgccgatcaagaaacttatcgcgctctcacttacgacctttctagctgcgccagatttcagggctgtacttcagttttcggcctgcgcgcgaaggctgtcgaaggtttcgatggcgctcaacccgacgttatcgaagttggggcatatccaacaccagcaggtgcgccatttttttgatgaactccactatgcgcagttcatgtcgacgcccgaagggcataacctccggcagctcgatgtgcgcgcatatctgctcaccgaacgattcgtccatgagtgcaccggcaagcagcagtttcgtggctgcttcaacctgaaccgggcacatacgctcctgattgactcatggaatgttgagcgtctgctgctcggcgacggcgccgactactggaggtgcctggacggcagaggaattgggggagaggttcatccgacggagcacaactgggtcgactacgactcgttgggtcacatcgcgctatgcgtgttgaaagacatccctgattggcgcgagtacgtacttgccaatcacggcgacgacgtccagcgaattgcggcctgcggttcgtgggcagctcgtgagattttggggattgcacgagatacgcagttaccgcatgtgccggatactgagagcgccaagcggttcttcgatggcgacgtctcgctcttcacggcgcttcgggacgcttactgcaatcgggggccggagagttgagtagcaaagcttcggccgtccccgctcctcttacaaccttccagttgccccccaaacccaatgacgcttatagtccgccccgtcgcccacatggcgatcaggtttggcgacctgactatcggatgcaaaagcactgcgctttttgtagaggctgttgcacgcctgcaaagctgtcttaatggcggctgtgcgcgggagaccttcgggtctgccgggttttccgataccggttcgccaacctgcgtacagctgtcaccctatcgtttggcgacgactgagtggcggtcaactactgcacttatcggagttttcaagatggaacgatacatccctctgactggaatcgatctggttcccgcctctttgctcattgattcagaagcgccgctcgatgtgctgcaagcgatggcggattaccgcatccgcaccgtgactcaagtactggaaaacattgcctttcgcagcgagttggaaacagattccgtagtgctttctgactttgcacaattgctggcaatccctttgcgtgacggctgcgacctgatggacatcatcggtcaacggctgcgcgccgaggtttcaacccccaaagaagcacctgcaagccagagctaagctgagccgcgcgcgttggtgtcgtcttagacccaacgcgcgcattgtccaaccgccccgctccccttatcctcacacctccccgcccccgcgaacccggagccgccatggacctcgccaccctcgcccttttcctccccgcctgcttcgccctgaacatggcgccgggcccgaacaacctgctgtccgtgagcaactccacccgctacggctaccgcacgtcatgcctggcgggcattggccgcctgctggccttcgccggcatgatcgccctcgcctccgcagggttggcagtggtgctgcaaacgtcggagttgttgttctacgggatcaagattctgggggcagcgtatctgttttatctggcgtttcagttgtggcgggctaatccggaagcggaggctgagtccgcgacggccaaggtgggattgtgggcgttggcgcggcaggagtttttggtggcagcgggtaatccgaaggcgatcttgatcttcaccgccttcctgccgcaattcgtggtgcccggggagccgatcaccccgcaattcgcgctgttgggcgcgatgttcctggtgctggagtggattgccatcagcgcctatgcctatatgggcctgcatatgcgccgctggtttgccgagccacggggcaagcggatcttcaatcgctgctgcgccgggttgttgtcggcggcggcgtcagtgttgttgatggcgcgcagggcttgaatggaagaaagctaattttgcaaatcgaatcttggctgcacgcacaagcatccacggtcttggagacctaaatatccgtttactaagtcgtgccagtaatattttacgcgccatgcattgcctaatgtattttaccttcctcagaaactgccagactgaaatcagtcaatataaaaagacttcccgacgagaacaaccatgagcaaaaatcatttcatcaagatgtttgaagcaaaatttaactatttatggagccttttcatcgccactgacacaataaagcataatggggaaaaagggagcctaagagaggcatttgtaaggcagattatagaatcacttctgccacaccacttcgccatagggagcggtatcatcaccgacttcaacggaaaagagagttcacaggcagacataataatttacgacaaaagattgatcccacccatattccaagatatcggccgtggaatttacccaattgattccgtactaagggtcttggaaataaagagcaacctagacaaaaagtcattaatccaaattaaagacgcttcttggaaattaaacccatcaaacccagacggattgaaaattgcaaacagcggaaatttaccaggtggacagatgaactatccgctatatggtgtttttgcatacaaatgcagtatctccaatttaaataaaacgcttagcagtcttggagcggcaacgccttttcccaccatggcgatattaggcaaaggtgtttgcctcaataaatcaaatacacttactaccgttgaaagcaactcggagctgactcgcttctttatgagcttgtacttagagtgcattgaagaagaagcagcctcacgccaccacttcggcctaataagctggctggggaaaagctttttcactatgcagcccacggctacatagcccacacaatcccccccctaaacctccgaagatttttaaaaacatagaagatagcgttcgaaaagttatacgcgaatacggataattttttactatttgaaatagcatgtgcgtttcatgcaagtttcaatactattttttaaaccaattactctaccgccctttctaggagagatgtcatgaaaaccatcgtggtcggtgcaagcaaagggttgggcaaagccctgatcgaagggctcggcgagccgggggatacgctgatcggtgtgtctcgctcccgcccggaacagctggcccacaaggccggcgtcgaggtgcaatggatcgaagccaacctcgcgaaaccaacccaggcggcgcaaatcattgccgaggcggtggcaggaaacggcctggacacgttgatctacaacctgggcatctgggaagaattcgccttcgacccggcctacaacttcctggccgacgacgatgaccagatcgaagccatcgtcacctgcaacatcacctccaccctgctgctgatcaagcgcctgttgccggtgctgctcaagagcccccaccccaggatcattcttaccggctccacctccggcctgccgcaaagtggtcggccggaagtcgccttcggcgcctccaagttcgccttgcgcgggatcgccgatgccctgcgtgaaggttatcgccggcagcgcctggcggtaacctgcctgaacctgggttatctcaacaccgaagatcccttgagcaccccacgtgcacaggccgagcaaagggatgaaggccattcgattcccgtgcacgatgtggtgcaggtggtacgcatggcgctgagcctgtcttcggccagcttcgtcaaggaaatcaccttgccggcgatactggacgagcgcttttaacaccgggagagcacggcatgacccgcgatgaactcgccaccttctaccaaggctatatcgactgcctcaaccgccaggactgggaccacctgggtcatttcgtgcacccgaacgtgacctacaacggcgaagtcgtcggcctcaccggctaccgagccatgctggagcgggattttcgcgagataccggacctggtgttccgcatccagctgctggtggccgatccgccgaccgtggccagtcgcctgaacttcaaggtcacgcccaggggcgagttcttcgggttgccgatcaatgggcgccaggtgaggttcgacgaaaatgtgatctatgagctggtcgacggcacattcgcccacgtctggtcggtaatcgacaaagcggccatcgcgcaacaactgggcgactagactccacagacccattctcacgtggagaccgatcatgacccacaaaaacaccctttgcctctggtacaacggcacagcccttgaggctgcgaccttctatgcccagacctttccggacagccgggtgaatgccgtgcacctggcgcccggcgattacccgtcgggcaaacagggcgacgtattgaccgtggactttaccgtcttgggcatcccctgtatcggcctcaacggcgggccgatcttcccacataccgaggcgttttcgtttcaggtggccactgatgaccaggccgagacggatcgttactggaacgccatcgtcggtaacggtggccaggaaagcgactgcggctggtgcaaggacaagtggggggtatcgtggcagatcagcccacgcgtgctgacggacgcggtgacccaccccgaccctgcgacggccaagcgcgcgtttgacgcgatgatgaccatgagaaagatcgacatcgccgcgattgaggcggcgatagcggcggactaaggcagagcatccagcatggcgttggccgccagggcatggaccttgcgggtggggtgccattcgtcccagtaataatgcgcgtcggggttggcacacatcggtttagcctccgggtaagtagcctggcatggcgtgtcgaggtcggtgaaaccatgggccgccggattggcgcgcaatgcgtcgctgaaagccaggtggtcgaagtagctgacctttgccgtgccgatctgcgccagcacggccgggagtttctgcgcgagcaactgctggtattttttcgcgttggcgacttggttgccctggaccaccgcaggcacatggctgaggtctgtggtgcccaccaccatcacatgccgggcacccgctgccaccagttgctcagtggctttgcgaatattcgtcaggctcgattcgctcagtgcctcaagggtttccgtgtgggagaagtcggcccactcgaaaaagtcattggccgagatgaagatgaagtacagcgccttggggtcggcgttgtgggacttggcagcctgcaagtgctcggcgatctgccctaggacaccggtgtcctgggagggcatcatccaggtgtagtaattgccgtggccacttttggcgccccccaccgcgtagtcggtcagcggtgtgcgcagggcctgagccaggccttcgacggcggtcgagccgttgctccagcgccccctccagtacagcggcccaggcaacacctgggcctccttgatcttctgtgcagcgagccgtgtggtgagcgcttcgcccgcgccgttgtcggagtagctgtcaccaaaggcatacacgtgatcataggtcgaggcgccgaaggcggttgaagcggacagggtcagcagagcagccaaacacgcacgtcggatcatcgcgtttctcccggaatgtctgcacagactaccggttggcgggagccatgctggaaccattgcgacccgtacatatccagcggcggctatacagcggccatcctgctggttaggcttggcacctgcaacatccagttaaagttccagcgtcacccgccgtcacccttaaatccccgaatggactcaacgaggctctcgtgcgttttatcactccccttttgctgatcggtggcatcgccaccctggccggttgtgccacccagaaaacccaagtcgaaaccatgctggccggcgccctggcccagcccctggttgaaaacagtatcgtgcgcgaaggcgacgtgctcagcttcgaactgttgatgcctggcgatccaggcgctctgcgccgcacgttgcaagtcgaggccgcctgttcttcgccgcaactgcacttgctgtatctggacggttcgcaacgggtctaccccgccagtgccggtcgctacagttcgccccgcagcttgtcgccgcagttgcgtgcaaccctagccgccaaccagaccttcgtccgcgcctgtgccgaaacacccaagccggactggcgcctggtacagaccaacgagcgcgacaaccaggtgctgatcgacgccaacagtatcaagagcgtcaacggcgaaacgcgcttctgggccgccttcgataacccgacggtgctcaacgacctgccctacaacgccccctatgcgcaaaaacgcgagcactttgcggtgtcgtgcacaggcggcacctacaagcagttggccggctacgacatggacgccaacaaccgcgtcagcgacggccgggtcgacagtttccccacgccgcagaacatcgctggcagcaatgccgactacgaattgctgttcaacaaagtctgcgtcagcccggaaaagatcgctgcactgcccgcgttcaagccgcgcatgaaagcgccggccaccattgccctgacctcggtgcagccggcggtgctggcggccatcgcccagttgaacctggacaaacccacccgctcgttcaaatacgtccagttcgcgggcaccagcaactaccgtggcaagaccagcgataaccaaagcacgcagttcatcagccaggacgcgccgagcgggcaactggccctggccacccgtggcgacggctatgagagccaggccgtgagctggcgcaacctgttccacctggtgtcgaaagccacctacggcggttcgggcatggcggaaagctcgaccctgacccaactgagcttcaccggtaactggaaggcgctgcccgtgggcgagaccgtcacctacaccaccgcacgctccagcctcaacagcctgatcggcagcagcaccaacacgcagaccaaccgctgccaggtcgagcgtgaactgccggccagcgaactcaacgcgaaactggcgggcagcgccaaggcgttgtcctgccgcaccgacgacgacaagtacaagcgcgtcagccacctgtacttcctgaccgactacgcttacttctttgaatcgagcaccgacaagaacgagtttttctactccgactcgcgtatcgataaattcgaataaggcccgttgacacactctgcaatattccatgaagatggaggccttgttcagggtgtgtcagcttatgtccgcaatgccttccgttaaccgttccgtcattggcttgattgccaaggcgcaaggttgcgttgcgcacgccctcaaatcgaagaaacagtcgctcatgtgaccggggcgcgctgtcccgtcagatgagctgacaggacattgagcgcgacggtctactctcccttgcaccattccctctgcccttctgacggtgactcaagcggtcaatcatcaggagaaagtgcatgtcatcgtttcaaggtatctgggttcccgtggtcacgccgttccatgacggcgccatcgactttatcggcctgcgccggctggtcaaccacctgctggaaaagcatgtggccgggatcatggtgtgcaccaccaccggcgaagccgcgtcgctgagccgcgccgaacaactggcggtgctggatgcggtgttgcagctggtgccagcgcaccgcgtggtgatgggcctggcgggcaacaatcagattgagctgctggacttccagcgtgacatcctgcaacgcccggtggccggtctgctggtgccggcgccgagttacatccgcccgtcccaggccggcctggaagccttcttccgcaccgtggcggatgcctccagcgtgccgatcattctgtacgacattccctaccgcaccggcgccacgtttgagcaggccaccttgctcaacatcgtggcccacgaacgcatcgtggcgatcaaggactgtggcggcaacctgggcaataccctcgcgctgctggccagcggtgaagtggatgtgctgtgtggcgaagacctgcagatcttcaacgcgctgtgcctgggcgcgaccggcgcgattgcggcctcggcgcatgtccatacggaacagttcgtagcgctgtgccagcaggtacgcgacaaccaattggccgacgcgcgggcgaccttcatgcagttggtgccgctgatcaacacactgttcatggagcccaacccggcaccggtcaaagccgccctggccctgcaaggcctgatcggcagcgagttgcgcgcaccgatgcaggcggccagtgcggcggttgtcgcacgcttgaagcaggtgcagaacctgcccggctaatgcgccaaaaacagacagccagcggaccgtccggttgcgaccggaccgatcccggcctatcgtcgaacccacgctttgccttttgctgtccaacccatccgtattcaggtgacgacatgcccacgctgccccgccccgccgtgctcgaactgatcggcaacacgccgctggttcgggtcagccggttcgataccggcccttgcacgctgtttctcaaactcgaatcccagaaccccggtggctccatcaaggaccgcatcggcctggccatgatcgacgccgccgaacgcgacgggcgcctgcgccccggtggcaccattatcgaagccaccgccggcaacaccggcctgggcctggcgctggtcggccgggccaagggctaccgggtggtgttggtggtgcccgacaagatgtccacggagaaagtgctgcacctcagggccatgggcgccgaggtgcatatcacccgctccgatgtgggcaaaggccaccccgagtattaccaggacgtggccgcacgcctggccagggatattccggattcgttcttcgccgaccagttcaacaacccggccaaccccctggcccacgaaaccagcaccgcgccggaaatctgggcgcagacccaacatgatgtcgacgcgatcgtcgtcggcgtcggctctgccggtaccctcaccggcctgacgcgcttcttcaagcgcgtacaacccgaactggccatggtgctggccgacccggtaggttcggtgatggccgaatacagccgcagtggcaagatggaaacaccgggctcctgggcggtagaaggcattggcgaggacttcattccgtcgattgccgacctatccagcgtgcgtcatgcctactccatcagcgacgaagaaagtttcgaccatgcccggcagttgctcaaggccgaaggcattctcggtggttcctccaccggcaccctgctcgcggccgccctgcgttactgtcgcgaacagaccgagcccaaacgcgtggtgactttcgtctgcgataccggcacgcgttacctgtcgaaggtctacaacgaccaatggatgaacgacgccggcctgttgcactacaaacactacggtgacctgcgcgacctgattgcgcgacgcttcgaagacggccgcgtgatcagcgtgagccccgacgacaccctgctcaccgcgttccagcgcatgcgcctggccgacgtctcacagttgccagtgctggtggacggccagcaactggtcggtgtgatcgacgaatccgacatcctgctcggcctgcaccaggacgccagccacttcaccctgaacgtcgccagcgccatgaccaccaccctgcaaaccctggcccccagcgccagcctcgcgcaattgcaagcggagctggatcgcggcctggtcgccatcattgccgacgcgtcgggcttccatggcctgatcacccgcgtcgacctgctcaaccacctccggagatcccttgcatgagtcagtctgataaaagtgcgtttgccacccgcgtgatccatgccgggcaatctcccgacccgaccaccggcgcgctgatgccgccgatctacgccaactccacctacctgcaagacagccccggcgtgcacaaaggcttcgactacggccgctcccacaaccccacgcggtttgccctggagcgctgcgtggccgacctcgaaggcggcagtcaggcgtttgcctttgcctccgggctggcggcaatttcgacggtgttggagttgctggatgccggcgcccatatcgtctccggcaatgacctgtacggcggcaccttccgcctgttcgacaaagtgcgccaacgcagcgccgggcaccgtttcagctttgtcgacctgagtgacctgtcggcgtttgaagcaagtttgcaggacgacacgcgcatggtctgggtcgaaactccgagcaacccgctgctgagcctcaccgacctcagcgccattgcgcgcctctgccgggatcgcgggatcatctgcgtggccgacaacaccttcgccagcccgtggatccagcgcccgctggagctgggctttgatgtggtggtgcactccaccaccaaatacctcaacggccattccgatgtgatcggcggcattgccatcgtcggcgacaaccccgaactggccgaacgcctgggctttttgcagaactcggtcggcgccatcgccgggcctttcgacgccttcctcaccctgcgtggcgtgaaaaccctggccctgcgcatggagcgccattgcagcaacgccctcgacctggccacctggctggaacaacagccgcaagtggcgcgggtttactacccaggcctcacctcacacccgcagcatgaactggcgcgcaaacaaatgcgtgggtttggcgggatgatctcgattgacctcaacagcgacctggccggcgccaggcgcttcctggaaaacgtcaagatcttcgccctggccgaaagcctcggcggcgtggaaagcctgatcgaacacccggcgatcatgacccacgccagcatcccggcggcgacgcgggcgcagttggggattggtgatgggttggtacggttgtcggtgggggttgaggatgtggaggatctgcgtgccgatttggctcaagccctggcacatatctgaataggttggctcggtctatgtgatgggcgggctcgctgtggcgaactggcttgttgtggcgagcgggcttgccccgcgttgggnnnnnnnnnnnnnnnnnnnnnnnnnnnnnnnnnnnnnnnnnnnnnnnnnnnnnnnnnnnnnnnnnnnnnnnnnnnncccaacgcggggcaagcccgctcgccacaacaggcccgctcaccacagcaagccagataggcgtcaagccgaggtgaccttggcccgcgccgcatgcagcttcttgtagctgtcgatcaagcgcagatgccggtccaacccttccagcttcatgctggtcggcgtcaggccataaaagcgcacatcgcccttcaccgagccaatcaccgcatccatccgctcatcgccaaacatgcgacggaagttggcttcgtagtcggccagttccaggtcatcgtccagttccatctccagcaccgcattcatcgcctggtagaacaggccacgctcggcggtgttgtcgttgtattgcaggaacatctccacgcactccttggcctcttcatattgctgcaaggccaggaagatcagcagtttcagctccaggatggtcagttggccccaggcggtgttgtcgtcgaactcgatgccgatcagggtggtgatatcggtgtagtcgtccagttcgctttcgatcaggcgctcgaccaacgcctgcaattcttcctcgttgaggcgatgcaggttgagaatatcctcgcggaaaaacagcgccttgttggtgttgtcccagatcaggtcatccaccgggtagatttccgagtagtccggcacgaggatgcggcaggcggtggcgccgaggtgttcgtacacggccatgtacgactctttgcccatgccttcgagaatgccgaacagggtcgcagcttcctgggcattcgagtctgcgccttcgccggtgaagtcccactcgacgaactcgtaatccgactgggcactgaagaagcgccacgacactacgccgctggagtcgatgaagtgctccacgaagttgttcggctcggtcaccgcctggccttcgaaggttggctgcggcagatcgttcagcccttcaaagctgcggccttgcagcagttcggtaaggctgcgctccagtgccacttccaggcttgggtgcgcgccgaaggaggcaaacacgccgccggtgcgcgggttcatcagggtcacgcacatcaccgggaattcgccgcccagggaggcgtctttgaccaacaccgggaagccctgggcttcgaggccctggatgccggcgaggatgccggggtacttggccagcacctcggccggtacgtccggcaaggcgaattcgccttcaatgatttcacgcttcacggcgcgttcgaagatctccgacaggcactgcacctgggcttcggccagggtgttgccggcgctcatgccgttgctgaggtagaggttttcgatcaggttggacgggaagtacaccacttcgccgtccgactggcgtacgaacggcagcgaaacgatgccgcgcgcttcattgccggagttggtgtcgaacaggtgcgaaccacgcagctcgccgtcgcggttgtagaccttgaggcagtaggcatcgaggatttcgctcggcagttcgtcatcagggcctggctggaaccagcgctcatccgggtaatgcacgaacggcgcactggccagttcctcgccccagaactgatcgttgtagaagaagttgcaattgaggcgctcaatgaactcaccgagtgccgacgccagggcgccctctttggtcgcgcccttgccgttggtaaagcacatcggcgaatgcgcatcgcggatatgcaacgaccagacgttgggcacgatattgcgccacgacgcgatctcgatcttcatgcccaagccggcgaggatgccggacatgttggcgatggtctgttccagcggcaggtccttgccggcgatataggtgccgccctcggacgtcgagttcggcatcagcaaggcctgggcgtcggcgtcgaggttctcgacttcttcgatgacgaattcaggcccggcctgcaccactttcttcacggtgcaacggtcgatggaacgcaaaatgccctggcggtccttctcggaaatatccgcgggtaactcgacctggatcttgaagatctggttgtagcggttctccgggtcgacgatgttgttctgcgacaggcgaatatggtcggtggggatattgcgcgtctggcaatacagcttcacgaagtacgccgcgcacagcgccgacgacgccaggaagtaatcgaatggccccggtgccgagccgtcgcctttgtagcgaatgggctggtcggcaatcaccgtgaagtcatcgaacttggcttcaagccggaggttgtcgagaaagttgaccttgatttccatgggggcacaccagaataacggctaaacaaaaatggccgccattatgaggggtttcactgggaagtttcaggcttttgaccagtggctggcgaattgacccatatggattaaccttttcgcagttggcgccgatggactgagggcaaccagggagtagtcggaatgcgcaataaccagcccgtaacacagcgtgagatttccctcgcgccttcgcaaaaactcatttctgccacggatgtccgaggtgtcatcacttactgcaacgacgcctttgtcgacatcagcggctttgaacgcgccgacctgatcggcgcgccgcagaacatcgtgcgccacccggatgtgccgcctgccgtgttcgcgcacatgtggagtgcgctcaagcagggcctaccgtggatgggcatcgtcaagaaccgctcgaaaaacggcgaccactattgggtcaatgcctacgtcaccccgatcttcgatggcagccaggtggtcggtttcgagtcggtgcgggtcaagtccacggccgatgaaatccgccgggcccaggccctctatcaacgtatcagccaaggtaaaccgggcgtgccgcgccaggacgcctggctaccggccgcgatcaattgcgtgccctacgtggccaccgcagtggccggcagcctcgccggtctgttcctcgacgcgccgctggcaattgccgtggccgtcgccgtcgcggtgccagtgggcgtgctctgctcacgctggcgccaaggcagcaccttgcgcctgttgcagggcgttgagccctcgacgtcggacgccttgatcgcgcagatgtacagcgacgccagcggcccgcaggcacgtttggagaccgcgttccaaagccaggccgcgcgcctgaaaacctgcctcacccgcctgcaggacagtgccgaacaactgagcgccctggccgggcagtccgatcagttggccaccgccagctccaagggcctggaccgccagcgcgtcgaaaccgaacaggtctcggccgccgtcaaccagatggccgccaccacccaggaagtcgccagccacgtccagcgcacggcggatgccacccagcaagccaatgtgctgaccgggcgcggccgtgaagtcgcacgggacacccgtgaggccatcgagcgcttgtccagcgtggtcagcgaaaccggcgcgaccgtggcgcaactggcgcgggacagcgacgaaatcggcagcgtggtggacgtgatcaaggcgattgccgaccagaccaacctgctggccctcaacgccgccatcgaagccgcacgtgccggtgagcaagggcgcggctttgccgtggtcgccgatgaagtgcgccaactggcacagcgcacgtcgcagtccaccacccagatccacgcgctgattacccagttgcaggcgtcgtccaacaacgccgtgcaaagcatggaaaacggccaacgccaggcccaggaaggcgtggcctgggtgctcgaagccgaccaggcgctggtgggcatcagcgaggcggtgtcgcatatcaccgacatgaccacccagatcgccgccgccaccgaggaacagagcgcggtggccgaagagatcagccgcaacatcaccaccatcgccgaactggccgaccagacgtcgatccaggcccatcaatccacggacctgagcaaggaactgacgaacactgcgtccacccaatatgcgttggttgagcggttcaaccgctgagccgctgctgaatgcctggctagccggtttgttgtggctagccggtgtcctgtggctatccggtgacctgtggcgagcgggcttgccccgcgttgggctgcgnnnnnnnnnnnnnnnnnnnnnnnnnnnnnnnnnnnnnnnnnnnnnnnnnnnnnnnnnnnnnnnnnnncgcagcccaacgcggggcaagcccgctcgccacaacaagcccgctcgccacaccaatctccttcaccacaacatagtatgctgaggctcacctccacccattcacgaagcccacccatgtccatcacggataacctcctcgccttcaccttcgccgccaccctgctgaccctcacacccggcctcgacacagcactggtgctcaggaccgccacggtcgaaggcaagcgccaggcgctgcaagccacgctgggcatcaacgccggctgcctgctgtggggcgctgcggttgccttcggtctgggcgcactgatcgcggtgtcggaagtcgccttcaacctgctcaagtactgcggcgccgcgtacctggcctggctgggtttgaacatgttgctgcgcccacgccgctcattggccagcgccgaggtgcaggtcaagccggccggcaactggtttatcaaaggcatgctgggcaacgtgctcaaccccaaggtggggattttctacgtgtcgttcctgccgcagttcatccctcagggccagccgttggtgctctggacatttggcctggtcagcatccatgtgctgctcggcctggtgtgggcattggtgttaatcggtgccacgcagccgctgtccgggtttctgcgccgggaaaaggtgatccagtggatggaccgcaccactggaatgatcttcatagtgtttgcagcgcggttggcattcagcaggcgctgatccgtatggacagttcaatgtcatcggcaaacggcaccgacacgtagccgttctccggtgcacgtacgtaggccaggtattcagggcagtaatcggtgttgtccgccaccaccagcgcgccgggacgcaggtgcttttctaccaggcccagcacatcgccatacagcgtcttggcgccgtccagcagcaacaaatccacgctgtccggcaggtccctggccagggtgaccagttcatcgccttcgcggatctggatcaggtcactcaccccgccttcgatgaagtgctcgcgcgccagggcgatcttcgaggcttcgaattcgctgccgatcagcacaccgccgccgttgtcacgcagcgcagcggccaggtgcaaggtggacaggccgaacgacgtgccaaactccacaatcgcccgcgccttgctgctgcgcgccagcatgtagagcagcttgccagtgtcccgcgagaccggcagccacaggtccttgagcagcgaatacagcgccacgtattcggtcttgctgtgcatcagccgatcgcgttcctccttggataccgagttcaccaaggggctggtagcggcgctggcttgggtatacagacgttcgatcagggacgccaaaggcgcagtggtcaggctcgacataattgatttccgtagagtggggactaagatgcgactaattcgtcgcattaaaagtatgcgagtgattcccatccttcgctattcgcattcgccctgcttccggagccctgtatgaccagccgccagaccccacgtatttccacgcgcaaacagccgcaacaggcgcgctccaccgagctggtggcggcgattctcgaagcggctgttcaggttttggccaaggaaggcgccacccgtttcaccaccgcacgggtcgcggaaaaggccggcgttagcgtggggtcggtgtaccagtacttccccaacaaggcggcgattctgttccgattgcagagtgatgagtggcagcagaccacccggatgctgcgcaacattctggagaaatacgacgaagcaccgctggatcgcctgcgcaaactggtgcatgcctttatccagtcggaatgcgaagaagcgcagatgcgtggggcattgaacgatgcggcaccgctctatcgcgatgcgccggaagcgctggaagtccgggcggcaagccgggaaacgttcgacgcattcatgctggagttactgccgcaggtctctgagcagacacgcgcgctggcctgcgacttgattcgcacaacgctcagttcggtgggcaaggatttttcttgcagcccgcgcaccgcgcaagaaatcgctgtgtatgccgaggggatggctgatatgtttcgggcgtatgtgaatgcgcttaaccatccctgaagcgtactgccccggcatctacccgctgcgcaatagatgtccagacctatagcagaactaccgcaccttctgaggcgtcagccagccacacagtcaataacaagtcattgactgagcaatggccatatgatatcaaaccagctcatggatatgacacttataacaataatagggatggagcctacatgcagaaaatcatgagaaaaaccttacctcttttatgcatgttcaccgttgcagttcaactatcaggatgttcacaaaacgttgtcattcaaggagcggagacacttggcaatgatgccagcgcctacttgaagtcggataatggttggtcttggggcgggttagagacaaccgtaatcgccgtctacccaaaaacgggaaaaccgctgttagaacaaaactttttcctggactacagcaagataaaaatcgcccctggcctctatgcagttgctttaagagtcaattatggcaatgccatagcatttcctgtggttagggtcgaggccaaacctggcaagacctatctcttcacagccaagcgcgtgatggacggagtagccatcaaagctgagtataaagaaaccaacaccatcgattaaatccaaggacggaaatatgaggcagagttttgcatttctttttttaatgctgctggccgggataaccgggtgtgtgtctcggaatattccattaatcgaagacgacactgaaacctcaactaaggttcgtttcgtttcaccgcgagagatgggttggattaatctataccccgagacagactgcaacaacggcgccctcgtggtggtcgacaattccgttgataactttatagagtcactgcgcgggcactcgccaaaaagaataggaatgatcgactctccagaccccaactctcaagcagcggcagaatactcgttcaaaggcggtcagactctcaatatcggcgttacccccttccctggacgctgccttggcggtctaagctttcccactgaacccggatcgcaatatgaagttgtcctggtgagcaatacatcgaacgggtgcaaattcaaggtcagtaaactcaccctgctcaatggctctccccatcgggagcccatcaacaaaatagctccactgatttgcaagtaacccgtcaagtgaaccggtccttcttccgtagacgctttcaaaggaccgcttctggccgatttctgcctgttgcagcgggcagcaatctggatctgaatcaacgtacaaggaggcgtgaagtgcgcgacaagcagatctgggaactgacagaaagcgatctgcacgctgttggggtatggtgctttccgatggacgattccgttgaagatgaatgtacagtccgaccttgtgttgaggaagtaggcttggcgatgatcgtgcgagctgagttttgcgctgccgatggcacgctctatcttggatacgtgcactggagtctggatgaacatattggccaccgacaacctacgctgttgctcaatgacggcacagcggtctcgttttgggggggcattgttaaaccctcctgggatgaagcctcggatgaggcgaaacggatttctttccctatcacattcaagtctgaaccattgctcgggctcacgccgatggttggctgcctagaagggacgtattacctagatagcaatgaccagatttcttgcctttcgataggtgaaaggtgaggacaatagctactctaatctgactttcaccagtgcctgaatgcggcaaataaaacgacgcgtgtcgatcggttctggccgttttcagcccatcactccagattgcgcagaatcaagcgacattggaaatgccccttttctagtgtgttctcaacgcattcgccagccgcaccatcgccgtttcgatctcatgagcagtcaaggacgcataccccaacagccaaccctgtgtcttcttatcgccagcgtacaaccggctcagcccagaaagctgcacattcgcgctcgccgcctggcgaatggttttttcttccgaccaaccctcggcaagcagacaagggatctgcagcccgccttgggggcgcagcgcggtgactatcccatccaggtgcttgccaatcgcatcgagtgtggcggttcggcgtgcagcatagagtttgcgcatggcgcggacatgggcgttgtaatggccatcttccataaagcgcgccagtgtcagttgcaagacttgcggtgtgtggccatccatgatgctgcgcgcgtaagtaaaggtcttgaccaactcatggggcagtatcatgtagcccattcgcagccccgggtagagcgtcttgctgaaggtgcccaggtagatcgtgcgccggtgcttgtccaggccttgcacgcaggcggtcggatgcccgtcgtagtgaaactcgctgtcgtagtcgtcttcgatgatccacctgccctgctccgccgcccagttgatcagctctagtcggcgctccagcggcaacgtcgctcccgtggggtattgatgagacggtgtgacatacacgcagttggcaccgctacgatccgcccgcagcaattgcgtgcggatgcccagttcatcgacgtcaatgccgacgaccttggcttgcgccgcttcaaaggctttcctggcaccgaaatagcccggattttccagcaggatcgattgaccggcgtccaccagtaacaacgcacacaggaacagcgcctggcgcgtactgctcaacaccaggatctggtccggggagcactgggccccgcgctcaaggttcaagtaggtggcgatggccttgcgcagcggcgcggcgccctgggggtcgccatgcagtaacacgttggcgcgatggtccttcatgacctggcgttgcaggcgctcccacacgtcgatggggaaggtgcgggtttccggcaggccggtggcaaacgcagtgaccgcctgctggtcagtgacgccaccactgttgaaaatcatccgcccgcgcaggctcaatcccgcccttggcacctcctcccggtggttcatgtcttggggtttgctacgcctgcgtgctgcgccatgcagttgggtgccaagcgcgtcgcacacgtagctgcccgccccctcacgccgcacgatgaagccatcgcgatgcaattgcacataagcgttctccaccgtgtcgcgcgcaacgccgagtgacttcgccaaggtccgggtagaaggtaacttcagaccgggatcaagggcgccatcgaggatcaacgcccgcagcgcgcgctgaatccgatggttcagatccaacagcttgagctcggcatcgtcgagtcgcattttcagcgtatccaactcgaaggtttttgccatgtggtctggttgactccgcaaaagtgtaggggcgaaacataccatttcaagcctataaatggcgcctccaccaagcacctgactttgcaaggagcaaagcaacatggcctcttccaacgcccactcgcccattcaactacgcgaccttttccacccgattgtcgcagggttggtttcggtcatcgtcaactatggcggcacgttcattctgattttccaggccgccaaggtcgccgggctgagccctgagctgacggcttcgtgggtgtggtcggtgtccatcggcgtgggcattaccgggctcactctcagctggctgacccgtgagccgatcattaccgcctggtcgacacctgcggcggcgtttctggtggtcgcactcgggaccaccccctatgccgaagcgattggggcgtacatcctttccgcggccgccttcgtgctgctgggtttgtcagggcagttcgaaaaagtcatccgcctgattccccctggcgtggccgcagggttgttggccggtatcctgctgaaattcggtatcggcgcgttcggcggcatgagcgtcgacccggtattggtcgggctgctgattaccgcttacgtggtactcaagcgctttaccgcacgctacgcggtggtgggcattctggtgctggggatgggttttttgctgacccaggggcgcgtggatttttcggggctggcgttgcagttcgcggtcccggtcttcacccagcctgagttctcgttgaatgccctgctcagtgtcgcgctgccgttgttcctgatcaccctgacgggccagtacatgccaggcatgctggtgcttcgcaacgatggcttcagcaccagcgccaatcctgtgttgaccgtgaccgggctgggctcattgctcatggcgcccttcggttcccacgcgtttaacctcgcggcgattacggccgccatttgcaccggcaaggaagctgcgcaagatccgtccaagcgctggatcgccggggttgcagcgggcgtgtgctacctcgtgatcgggattttcggggtcacccttgcagcggtgttcatggtgctcccggcaacgttcatcacgaccctggccggcctggccttgctgggcgcgatcggcgccagcatcgccagcgccatggctgacagtcaatcccgcgaagcgtcactgatcaccttcctggcctgcgccgccaacatcacggtgtttggcatcggtggggcgttctggggattgttgattggcctgggggggtacgccgtactcaacgggcgctggtcgcggcgtgagtcggtggtcggttctgccgtcaaacctgttgtaaggactgaggatgccgccaactgatgcaggtgcctggtgcaaagtgatcgccagctaggtcgtcggctcctcggcaccagacggcgcccgataacagcctggcgcctgtctgtgcaacgaaggccagccttgcgtgtagcgagccatacactcactacacgtccagaagatagcccccttcagagcatggctttattgataaataaattgatacccaacgatgtaagaaccgatcttgttagcgtgggccgttacccgcaccgccgtcatgccccgctgtatctgatcattcaaatccgctttattcgtgcacagttgaatccagcgctcggtagtcacatccttgatccacacgccggcctcacaacggctcagctttcccaacgcgggccctgggaaagagatttcataggctgactcatagtgaatggtatctcccggcaataaataagcagcgacatcatacccttgtatggagcaagcaaaaccgacgcaaaaccagccgaaaaaagcgtccatggcgctttttagtgttctcccgcccccgccacgcaagacgcccctgcaagcgaaaaccagtccaacgacacaaccgatagcgatataggtcgtccactcagggatcgacggcatcaaaacggtccgcaggccgatacgcgacgcccagagcatataaacgatccaccccccaagcagcgcaaacgcgaccaacgtgatcgcgatctttcttgatctgttttcgaacgaagggtatttcacttcttgactactcaatgactgacctcagggtgtactccgtatgatgcagcaaaaaccaaccgatacctgacttcttccagtgttgcaccgcccctcacgaggttgcgctcagtgcctggctccgcgacacagcccgcccggcgataaaaccgtatagctcgttcattaaggctcaacacccaaagcgtcagaccctgatagccctgctcgctcagatactcaacgccggccgtccacaacgccagccccacgcctgtttgccagtacccggccaacacatagatggccatgacctcaccggtgttggcacccgcagcctcctcgtcacggctggcaccgaccgatatccaaccgaccacctgtccgtccacctccgcgacccaaaccttgggctcgtccgactcaatcgagtgcatccagaaggattcacgctgcgccagggtcgcttgcaacccgctcaaatactcggcaggcatcaggttacggtaggcgtcctgccaactgctgatatgcacttgggcaatggcccttgcgtcgtcgggtaatgccttgcggatcatgtcggtattcctttttcgagcattggccttccagtaaacccacgccttatgaccgtttatattcgccggggggcgaggtggctatccggcttcgaacaaatcgctgtctgggcgcacacattggctgatatgttacgagcctcacgagcaaagggatgcgccatgccaacgttagccagcaacgccgcactgctgatcatcgacatgcagcaaggcatgaaccagccgaagctgggacgccgcaacaaccccagtgccgaagcgcagatacagcgcctgctgcaggcgtggcggcagtctaagcgcccggtggtgcacatccgccacatatcccgctcgcccgactcggtgttctggccgggccaaccgggttgcgagttccagccggcgctgcaaccgctggcgcatgaacatgtggtggagaagaacgtcccggatgccttcacagccacgggtctggagcgctggttgcatgcgcgcgggatccaccaactggtgatcgtcggcgtgatcaccaacaactcggtcgagtccacggcacgttcgggcggcaacctggggtttgaggtgacggtggttgccgacgcctgctacaccttcgaccagaccgatttgtccgggcgcccgtggccagccgaggatgtgcatgcgctgtcgctgagcaacctggcgatggattatgccaaggttttggagaccactgaaatcctgggtgggttgtgagcatcacgcatgagaccggcaagcgaatcgtggtgattggtgcgggtatcgtcggcgcatccttggcctaccatttggcccactcgggccgccaatcacccacgtggagcttcgccccattcccgtggatggcctccccatcatcggctacctaccaactgtcggtggtgtctacgtgtgcgccatacatccgggggtggtactggcacccgtggtgagccggctggccagtgaagagatcatggacaacaccctcttcgatgcgcttgccccctgccgtcccagtcgattcgttcaagggctgacgcccgcaccctgaagcatttccaagagtccctccggccacaccgtttcttctgttgttcgaagttcagcggcggaccaccagcgatggtcggccatcacctgtgtctcatgcacagtccattcggcttttgacagcgcctcattgggcgcctgaaccacaaaatactgttcgatggccaacactgtttcgccacagggcaacatcaacgtcacgcggcgatcccctacaggcgctgcaacggcctctacctctatgccggtttcttcgcgcagctcacgtatcgcagccgcctcgaaggtttctccggcctcaacacctccgcccggggtcgcccagtaattttgcccggccagtgccccgtctttatgtacgaatctgaacagcagcactgcgtgtgaggggctgatcaccagtagccgtgcggcctttcgctcgcgcattattttatgccttccttgaaacgtgggtttgattacgctatcgcgggctgaccgcgtcaggcgttcaagcgttgtgcgatggccttacgcagctccccatgcgggtcttctgcgtaaggcagcgcattcttccaatcataaaaccacgctggcatccggcgtttatcatccggctccgaggcgtagcgcgggaacaaatggcagtgcagttccggctccgaattgcccaggatctcgtagttcatgcgcagtgcaccggtggcctgcaacaccgcgtcgcccaggcgcgccatgtccagcaggtagagggtacgcgcctcggtatccaggtcattgaggctggcaaccaccgggtccggcaacaacaggcaatagccgggcaggaactgcacatcccccatcaccgcccagcccgaggccatgcggcagatgaccttgtcgttggtgccgttgcgggcctgcgtcacgcgttcggtgataagcgccatgcaaaatccttggtcgagatgaggtccaggcagcatcttaacgcgacctcaagccctggaatcaacccatgcgcattgcctgcataccgcgacccgcaacatcaaccgtgtgcgccctgcaaaacccgctgaaggtaagcgtccagcacatcgatattcgctgacgaaacaatcgcgccgatatacccatcaggccgcaccagcacccactcgccaatcgccagttggtaggcacgttgaaactgaccctgctcgtcaatcacatctccctcaggcccaacgatatggacctgcacgcccggccaagcgggcactgaatcacgcgtgacgctataccccagcagcgtccagtgcgtaccctggaacagatggaacagccgcaacgcctgcccggcggcacctcgcagcagcgcgtccggcgcgcggtcacccgctgcaacgccgttacgcttggggtgctgcaacgccaatgaggactcggggtagccgatgtccagttgatgcacttccctgccccggcgcagttcgccgtgctgcatgtcgcccagcagtctggtggacaaaccgagcacggaggcagccaccggccggcgctcttcttcataggtatcgagtagcgcctcaggggcgccctgcaccaccgccgccagcttccagctgaggttgtaggcgtcctgcacactggtattgaggccctgaccaccggtgggcgggtggatatgcgcggcgtcgcccaccagcagcacccgcccccggcggtagtgatcggccaggcgtgcattcatggtgtaggccgatgaccagctcacgctgtgcacctggatatcggcgcgcccggtgcgttcggcgatcagtgcggtgagcccttcggcgctgaagtcgatgtcgccatcggctgggatcgggccctgaagctggaacagatcggtgccagccagcgggcagatcgcaatctggcgttgcatgtcgccttcgccaaagcggtgccaggcctcacgcgtcaggccggtaagcaccccatccgccaccagtgcacgcacgcccagggtcttgccggggaagccgatagccagcgcaggccggacgaagctgcgaccgccatcggcgcccaccagccagcgcgcacgcaggctcgcttcgccgcccttgccggccagcctggcagtgacaccgtcggcgtcctgttcgaagccgaccagctcacaaccgaactcaggccggtggcccagctcaagcaggcgctcgcgcatcagctgttccgtcagaaactgcgggaccatcaagggttgctggtagggctcggccggtgtcggcgccgtggatgcgctgaaatcggcatcgctgtagctgccgtcgtcgcggtagcgccggtcagtcggatagactccacccaccgccatcaagcgatcgagaatccccaggtcttcgaagacctcctgggacctgggctggatgcccttgccacgcgagccatggaaaggccggggatttttttcgatcaggcgaaaggtgatgccccttctcgccaggtcgatcgccaaggtcaggccggcggcaccggcaccacaaatcagtacatcgacagccgattgcgctttcatactggatcacctatatgtgcaatacgcacatattaagagaggcgaacaccgtgtcaattaaaaatgtgcaaagcgcacatatatccgcccagctgcgtgacctgcatggctcgctggttgaaatcgtcggggtgatgaaccgcccgcaacgcgacgaggcaatggtgcgcgaggccggaatttccctggaccgcgccctgtttccgttgctggtgctggtggagcgcctgggcccgattggcgtggttgaactggccgaccgcgtgggccgcgactacaccacggtgagccggcaggtggcgaaactggagaacctgggcctggttacgcgccaggcaagcgcacttgaccgccgcgtgcgcgagtcagtgatcaccgataaaggcaaggccatgaccgaccgcgtcgatgacgcacgcgagaggataggtgtgtcgatcttctccacctgggaggaaggcgattttgacaatctggtgcggttgatgcgcaagtttgccgaggacatcaaggaggattccgtgcgtgcgacgaaggggatttcctgaggccacccacttgttggtttgctgtggcaagcccgctcgccacaacaagtccgttcacctcagcaagcctgcgcacggcatcaatccaatgccaattccaccaccccgccgttcaaccgcaccggccatacccgcaaccgctgctccggggtctccaggcactgcccgtcttccagccggtaatgctgcttgtagatgggcgccgccaccaccaggtcgcccttgatgctgccgatcaaaccgcgaccgatcacattcgccccggactccgggtcgtgattgtcgatggcatacagcgtctgcgcctgcgcgcccggcaggtagaacaacgcgacttgcgcgccgtccagccacaccaccacgccggagtcgcgcaccaggtcttgctcgcggcacacctgtgtccaggtggccaggtggcgttgggtattggtttggctcatcaggcaatctcctcggtgacggcaatcaggttgagttcagcagccatgatcggccggcgttggccgcgttcctggacgaagtggatgtccgggtcggggcgtttgtcgttgacgaaggtgcggaaacgcttgagtttttccgggtccttgagggcgttggcccactcgcattcgtagcggtcgaccaccagttgcatctgcgcttcgagttcggcgcccaggcccaggctgtcgtgcaggatcacgtccttgaggaaatccaggccgccttccaggctctcgcgccacaccgaggtgcgctgcaacttgtcggcggtgcggatatagaacatcagaaagcggtcgatgtagcggatcagcgtggcgtcatccaggtcggtggcgaacagctccgcatggcgcggacgcatgccgccgttgccggcgatgtagaggttccagcccttctcggtggcgatcacgcccacgtccttgctctgggcttcggcgcactcgcgggtgcagccggacaccgcgaacttgagcttgtgcggcgaacgcaggcccttgtagcgatcctcgatcagcagcgccattttcacgctgtcttgcacgccgtagcggcaccaggtgctgcccacgcaagacttcaccgtacgcgtggacttgccatacgcatgcccggtctcgaaacccgccgcgatcaactcgccccagatatccggcaactcgtgaagctgtgcgccaaacaggtcaatgcgctggccgccggtgatcttggtgtagaggtcgtatttcttcgccacctcgccgatcacgatgagtttttccgcggtgatctcgccgccaggaatacgcggcaccaccgagtaggtgccgtttttctgcatgttggccatgaacgtatcgttggtgtcctgcaatggcaccagggaagcgtccatgatcggctggttccagcacgacgccaggatcgaacccaccgccggcttgcacacgtcgcaaccggtatggccacggccgtgcttggccagcagttcgtcgaaggtgatgatgccttccacacgcaccagcgcgtacagctcctgccgggtgtaggcgaagtgttcgcacaggctcttgtcgacactcacgccacgcgcaatcagttcatgttcgaacacctgcttgagcaacccggcgcagccaccgcaaccggtgcaggccttggtctgggacttgagcaggccgaggtcgctgcaactgccgtcgatcgcagagcagatcgcacctttggtcacgttatggcaagaacacacggtggccgattccggcagcgcaccggggccgagggtgggtgcgccgctggtggatggcaggatcaggccggccggttcggacggcagtgtgatgccgttctgcatgtactgcagcaaagtgtcgtagtagctgttgtccccgaccagtacggcaccaatcacctgcttacccgaagcatccaccaccaggcggcggtagctcgcgctggcctcgtcgatgaattgatagctgcgcgcgccaggcgtgtgggcgtgggcatcgccgatggagcccacgtccacgccgagcaacttgagcttggtcgacatgtcggcgcccacaaacggctcggcggtttgcccacagagcagcgcggcgacgccccgggccatctggtagcccggcgcgaccaggccgaacaggctgccgttccaggaagcgcattcgccaatcgcgtagatattcgggtcgcagctcaggcattcgtcgttgatcaccacgccgccacgcgggccgatgtccaggccggcctggcgggccagtgcgtcctgggcgcggatgccggcggagaacacgaccaggtcggcttcgaggaattcgtcattggcaaagttcatgcggtagcggtactgctcgccggcgctgatcgactgggtcgcccgtgacaaatgcacgcccacgcccagccgctcgatctgcgccttgagcgccaggccgccgaagtcatccagttgcaccggcatcaggcgcggcgcgaattccaccacgtgggcttcaaggcccaggcttttcagcgcgttggcggcttccaggcccagcagaccaccgcctaccaccacgccgcgtcgggcattggcggcggccttgcggatcgcatccaggtcttccagggtgcgatacaccaggcgcgagtcgccctcggcgccttcgattggcggcacgaacgggtaggaaccggtggccagcaccagcttgtcataggcgacacagccatcggcggtgatcacctcacagcgggcgcggtcgatctccagcaccggcacgcccaggtgcagggtcacccccggcgtctggtacagcgcagcgtcggacagcgccagcgactcggcatcgcgcccggtgaaatactcggacagatgcacccggtcataggcgcgcatcggctcctcgctgaacacatgcaaacggtagtgatccagcgcgccgcgttcgatcagttgcgccacacagtggtggccgaccatgccattgccgacgacgatcagggttttgagactgttcatataaatcacctgacaaagctcatcacggttttaaaagcaaaaaaaaacgcctgaaaccttgcggttccaggcgtctttgcctgttcttgtgcgggtttggatcgggcgactgcgccggattcaccgctattgccctggttgtcgatcgtcgttgaccgaggtgggttgcaggggagcttgcagggtctgtgccaagcgaagacccggcccgcgcttactgcattacgcgctcaacaacggctatgaacgtgagcagaatcgcctccaactggtgcgcctcgcgtcataaaagtgcacaacccttcctcctgtggtgaggggcttgttgtggtgagcggggctgttgtggtgagcgggcttgccccgcgttgggctgcgtagcggccctaaaggtaaacgccgcgatctttctggaagatcgcggcgtctggatcagggctgcttcgcagcccaacgcggggcaagcccgctcaccacaacaagcccgctcaccacaaaaagcccggccaccacaacaaccccattcacccagcaaattgcatcaggaaaaacctggcgcgtgacttgctaggaacactccaaccgggcagtcaacgcagactgccctctcacgacaaaggcgccgtgtaacccccgttctgaacggagggttacaaggcgccttttttgtttatacgggtttcagatggccaaccaaaacatacgcagtgtgtgtccctattgtggcgtgggctgcggcatcatcctgcaggtcgagcacaataaagtggtcaaggtgatcggcgacaaggcccatcccaccaacttcgggcgcctgtgcaccaagggcaccacctgcggccaggccatcgccgagtcgggccgtatggagaacgcctatgtgcgccaggcccgcgaccatgacccggtgcgcctcggtatggacaaggccatcagcgaaaccgcccggcgcctgcgccagaccctcgacacacacggcccggacgcgctggccttctatgtatcagggcagatgtcgctggagtcccagtacctgatcaacaaattggccaagggctttgtgcgcaccgccaacatcgagtccaattcgcgcctgtgcatggccagcgccggcagtggctacaaactgtccctcggttccgacggcccgccgggctcctatgaagacttcgaccgtgccgacctgttcttcgtgatcggcgcgaacatggctgactgtcaccccatcctgttcctgcgcatgatggaccgggtcaaggccggggcgaaactgatcgtggtcgacccccggcgcagcgccacggcggacaaggccgacctgttcctacccataaaaccgggcaccgacctggccctgctcaatggcctgttgcacctgctggtgaaaaacggccataccgaccctgccttcatcgcggacttcaccgaaggctgggaagcgatgccgccatttctggaggactattgccccgagcacgtcgccgccatcaccggcctcgccgaagccgatatccgccaagccgccgactggatcggccaggccgccgagtggatgagctgctggaccatgggcctcaaccagagcacccacggcacctggaacaccaacgcgctgtgcaacctgcacctggccaccggcgccatctgccgcacgggcagcgggccgttttccctcactggccaacccaatgcgatgggcgggcgcgaaatgggctacatgggcccgggcctgccgggacaacgctcggtgctcgtcgaggcagaccgcgcctttatcgaggacctgtggcaaatcccccacgacagcctgccgcgccaggccggcagcggcacggtggcgatgttcgagcagatggccgctgggcagattaaggcttgctggatcatctgcaccaacccggtggccagcgtgcccaaccggcaaaccgtgatcaacggcctgcaaaccgccgaactggtgatcagccaggacgccttcctcgacaccgagaccaaccgctacgccgacatcctgttgcccggcgcgctatgggccgaggccgaaggcgtgatgatcaactccgagcgcaacctgaccctcatgcaaaaagccgtggacgcccccggcgagaccctgcccgactggcagatcatcgcccgggtcgcctgtgagatgggctttgccgaggcctttacctatgcctgcgccgccgaggtgtttgaagaaatcaaacaggcctggaaccccaagaccggctacgacatccgtggcgccagctacccgcgcctgcttgaaaacccggtgcaatggccctgcgcttcggttgacgcagcgcaccgcaacccgatccgctaccgccatggcggcaccctcagcttcgccaccgaaaacgccaaggcgcggttcttcgctcgcccgcatatgccgcccgccgagatgcccgacgacgggtttcccttcgtgctcaatacgggtcgcgtgcagcaccagtggcacaccctgaccaagaccggcaaggtcgccaccctgaacaaactcaaccccggccccttcgtcgaactgcaccccgaagacgccgcccgcctgggcatcaaggacaaggaccgggtcgaaatacgctcccggcgcggccacgccgtgctgcctgccgtggtcaccgaccgcgtgcagccgggcaactgttttgcgccgttccactggaacgacgtgttcggcgaacacctggcgatcaacgcggtgacccatgatgcggtggacccgatttccctgcagccggagttcaagtgctgcgccgtcgccctcagccgcgtggagctgatcgaccaccagttcctcgaccgcccttcccccgtagcagaggacaccgccatgtcgcgcctcgacgccttcgctgacatcaatggcatccgtcacctatcgccaccggccctgagcgacgacgaacgcacctacctcgccggtttcctcagcggcctgcacaccagcgccgcacgccagggctttggcgtaccgaccctgccggcaactgcaccgctggcggatgccgctcgcctctggctgaacggcttgcttgccggcttgttcagtcctgcagaatccctcgcggcgccctccccggcggtcaccctgctgtgggcctcgcagaccggtaatgccgaagccttggccgagcgctttgccaagcgcctgcgcgaaacaggcatcaccgtggaactgagcgcgatggcggacttccccgcgagcaagctggcaagcactcacaccctggcgctgatcagcagtacctttggcgacggcgacccgcccgacaacggcgaaggtttctggcacagcctgcgcaccgccgagacccgcctggagtcgttgcgttttgcggtattggccttgggcgatccgaactacgaccagttctgcaaccacggcaagcaactcgaccggcgcctgctggaactgggggcaacccgcctgctggaacgggtggactgcgacactgaattcgaagccgccgccgatgcctggctggcgcggttccagcagaccctcaacccggcaaagccgatggcaccggccacccccgccggtaaaaccaagctgtacggctcacgcctgttgctcaaccgccacctcaacccgcacagcgcgcacaaggaaacccgccagttcgccctagacctggccgactccggcctgacctatgaagccggggatgccctgggcatacggccacgcaactgccccgaactagtcagcgaactgctcgacctcacccgcctgagcgccaacgccagcgtgaacatcgacaccttcggcgatgtgccgttgcaacaggctctcacccagcattttgaaatcgcccggcccagcagcgacaccctggccttcatcgccgagcgcagcgccgacccaggcctcaagcacttgctcaagcccgagcacaaggccgaactcaatgactggctgtggggccggcaactggcggacgtgctgcaggaataccccatcgaatgctcggcggatgaattgctaggcaccctcaagcgcctgcaaccacgcttgtactccatcgcctccagcgccaaggcctacccgcaggaggtgcacctcaccgtggccgccgtgcgctatggcaagcgcaaaggcgtgtcgtcgaccttcctcgccgaccgcgccggtgacggggaagtgccgctgttcgtgcagccgtcgaaacacttccgcacgcccagcgacggcgaggtgccgatgatcatgatcggccccggtactggcatcgcgccgttccgtgggttcttgcaggagcgccgggcgctgggtcatcaggggcgcaactggctgttcttcggcgaacagcatgccgccagcgacttctattaccaggacgagttgcaaggtatgcagcgcgatggcctgctcacccacctgagcctggcgttctcccgcgatcagacgcagaagatctatgtgcaagaccgcatccgcgaacagggtgccgagctatggcgctggctacaggagggcgccaggctgtacatctgcggcgatgccagccacatggccaaagacgtcgaccaggccttgcgccagatcgcgcaaacccacggcgggcttggcgtggaaggcgccgtggagtactggcggcagttgagcgaacagaagcgttatctgcgtgatgtgtactgattggatacagaacaatatgcactttgtattgtgtacaaaaaaccctaaagatttaccggtaccgggccgaaacagcagtgatagcaaatcgcctgaatcctgatcagggaacgcagcgatttggccgcccttcacgctgatggtcgtctcgatgaaaataaaaaataagctggtcctcgcatttgtctccgttgcatttattccggtaagcctggtggccgtgatttcggtcatgaacacacggacccaggcggtggatcagttcatcgatggcagtacccgggagatccgccagatcgatggcaacattcgccagttcttcgatggcacgttgcaaaacgtcgatcagatggcaacggatcctgtatacacgtctgtcagcacgctaaagaactaccaggccgccgatgccgccagccagccgctgccggccgaggcgcaagcggtgatcgagcgcttcgcgcgcttcggcgccacgcacccggcggcggcgatcctgtccatcggcctggaagacggcacctacgccaaatggccggatgacccgcaactggccaagtacgacccgcgcacccgcccctggtacaaggcggccatggccagccccggcaagaccgtgcgcaccccggcttattactatgacaaggacgatgtagcactggtgggcaccgcccgggcgatgctggagaacggcaaggccaagggcgtgttcgtggtcagcgtgtcgctgaaaaacctcaccgaactggtcaagagcatcaagctgggcgaaagcggctacgtaatgctgatcgaagacggcgtggtgctggtggacccgcgtgacgctgcccacagcttcaagccgctcaaggacctgggggcgccgtatgcgcaattggccgacacgccccaaggctccaccgaggtggtgatcgacggcgtacgctacatggccaacgtgtggacctcccccggcctcggctggcgctacatcggcctgatcgaacaccgcgaagtcatggctgaagccacgcgcatgacctacctcaccgcgatcatcgtcggcgtgctggtgctgatcttcgggctgatcgcggcggcgttctccaaggtcatcgtcaagcccatcggccaggtcagcaccgggttgcagtccatcgcccagggcgaaggtgacttgcgccacgaactgcacgtacagggcaaggatgaaaccgccgaactggccggctggttcaacaagttcctcgcggcgatccgccaactgatccagcacatcggcgcagcctcggccaatttgcacaacgcctccaaggtcaacagcgaggtggcgcacaacatgaacgaggcggccgggcgccagcgtgaagcggttgaattggtgtcgaccgcgttcaacgaaatggtcgctaccgccaacgaagtcgcgcgttcctgcagcggcgccgcggagtccgccgagaatggccaccgtcgcgtggccgaaggcaagcagcagatcgaagtcaccaccgacaacgtcaaccgcctggggcgccgactcaccgagtcgtcccaggccatggtcgaactggaagccggcagccgtagcatcaaccagatcctcggcaccatccgtgcgattgccgaacagaccaacctgttggccctcaacgccgcgatcgaggctgcccgtgccggcgaccagggccgtggcttcgccgtggtggccgatgaagtgcgcgccctggccaagcgcacctccgactccaccggtgagatcgagcaactgctcggcaccctggaaaacaagacccaggaagtcacccagaagatgggcagttgcctggacctgtcgcgggccagcgtgtcgtccatcgaaagtgcgcgggacagctttgaaggtatccagacgtcggtgaacgagatccgcgaccagaacctgcagatctccgccgccgccgaggaacaacacagcgtggccgaagagatcaaccggcatatccagcagatctacgacgaggcgcgcctggtagagagcctggccaactcggcgcaggacgactcggggcgcttgtcgacgctgtcggatgaactcaatggcttggtggggcgcttcaagtcctgaggaagtcggcgatctggcgccacatggcaaacgctcagatgcgcgattgcgccgggctcatgggtgatgcctctcgatcaccaggccttcagcctcgctcggcacactgaaatggcgggtaatcagatcaaactcagcatcagtggcggcaaagtcgtgctcaccctgagcgttgcgcgcatgcagcctggcccgacaggtggcgtcatccagctccaggtagtgcaggcagtgccgggccttggcggcgtgtgccaaccccagcagccattcgcgactggccactgtattggcggggaaatccagcaccacgttgaggcccgactgcagcacattgatcaccaaggggcccagtacgccgcgaatgcgctgggtgcatttgatgtaatccgcaatggcgtggatttcaccggggtaaagcgtggcgagccagtggtcttcgctgagcacaatggcagcgtgctcagtggcgagggtcttggcgagcgtggacttgccggaggcgatcttgccgcagagcaaatgcagggtgggcatggggcggttccttatgtcagtcccgccagcatgaccgccatggattgatcacacaacgccccgtttccaatgctcgtagaacgccagggccgcgacgttcttgtccttggcttcgagcatgatgtcgaagcggtcgagaaactgcagcgcataatcgttggtccagcggttccacatctgtgcgctgtgggcgtacaggtcgcgcttggacaccacctgcaacagcgcgtccatttccagcttgtgttcggcgtcgaagcccagttcctgcagactctcctggggttgggagtagtgcatggtcgggcgcacgccacgccagctttcaatcacccgggcgacccgctcggagtgggggtcgatgtagtcgttctcgttgatccagcagtggtggatgtccaggaccaccggtgccaggtcggcgacttgcaggcaatggtccaggccataggtcttttcgtcgttctcgaacgtgatgcagttgcgcgccacctccgacaggcgcgaccacacggcgcgggtgccttccacaccgagacggccggcgatatgcacgttgcacttgaggtcttggaagcgccggccatagcccatcatgcggatcatgtcggcgtggtattcgaattcggcgaggctgttttccaccacgccggggttttccgaaccgagtacacagtattggccagggtggaatgacaggcggatatccgaggcgcgggccagctcgccgatggcggcaaacccctctatcaattgacgctcgatagccgggtcttggtagacgctggccactttggggtggctgtagaacggcaacagatcgctgctcaagcgcaacatgcgcaagggcgacggcagttcggcgacatacgccaacaagcgtaattgggcggccaggttatgcgtgaccacttccaccagtttgtcccgggccacctgcggtgtgacgctgtccatccaccgcaacgtggtggtgcgtgggttgaacgggccttcgatcagcttctgggcgctggccgacaacagccgttcgggatgtttgtattggcacgcgaagccaatgcgagggtgagtcatggaggcgcctggcgtaggaaaaaggagcgaatgatacggggttagtccggggtctacccagcgcggttcccattatttctaaacgtttcacgctgaactttctcaccggcgctgcgttcacttcttatgcgctgccccgtccaggggcgttgtacaacaaggagccgctcccgtatgactaccctccccgcctaccgctacgcccccgggccgctgcatgcgaccttgctcgccggcaccgtgccgttgtttctcggagccttgctcagcgacattgcctacacccagacctaccagattcagtgggccaacttcgcctcctggctgatcgccggtgcgttggtgttcgccggtttcgcgtttctgttcgcgctggtcaacctgctgcgtgccgagcgcaaggccgggcaacccacgcgttatgtgctgttgctgttggccacctgggtactcggcctggtcaatgctttccagcatgccaaggacgcctacgcctcgatgcccggcggtctgatcctgtcggctattgtcttgctgttgaccctggccgccacctggaccggcctgcgtgcgggaggtgtcaaatgaaaacgtccaacacattgacgctattgagcaccgccctgctgctgaccgcctgcggtggtgaaggcgacaagacccaggcccgtggccccgaccccaagttgccggaacagcaaagcagcctgttgccgagcatgaagatcgccgagcccgcgccctggggcgaacagaaacccaaggtgccggacggctacagcatcaccgcgattgccaccgacctggcgatcccgcgccagaccctggtgctgcccaacggcgacatcctggttgccgaaggccgtggcggcagtgcggccaagctcaagcccaaggatgtgatcgccagcctgatcaaggccgagggcaacaccaaggtcaagagcggcaaccgcctgaccctgctgcgcgacgccgatggcgacggcaactacgaactcaagaccgtgttcgccgacaacctcaatgcgccctacggcctggcgtttgccaacggcaaactctatgtggccaaccaagacgcactggtgagcttcgactacgccgatggccagaccaaagccagcgggccgccgagcacagtcaccgccctgccggcacagatcaaccatcactggaccaaatccctggccgtaagcgccgatggcaggcagctgtacgtgggtatcggctccaacagcaacgtcaccgaacgcggcatggaagtggagatcgaccgcgcaatggtctggcagatcgacgccgccaccggtgcgcacaagccctacgccaccggcctgcgcaaccccacggcactgaccatccagccggacaccgggcaactgtggacagtggtcaacgagcgcgacgaactcggcccggacctggtaccggactacttgacctcggtgcgtgaaggcgcgttctacggttggccctacagctactggggccagaacgtcgacccgcgcgcccagccgcaaaacccggccaaggtggccgccgcgatcaagccggactacagcctgggctcccacgtggccgccctcggcgtggacttttccatcccgcagatgggcgagcagtttgccgatggcgtattcgtcggcgagcacggcagctggaaccgcgacaacccggtgggctacaaggtgatcttcgtgccgttcagcaatggcaagccgtccggtgagcccatcgacttcgccaccggctttcgcggcgacgacggcaagacccgtgggcgcccggtgggtgtgacggtggacccgaaaggtgcgctgatcatcgccgatgacctggccaataccgtttggcgcgtaacgcgaaaccgttaaacaaaatgtttgacatgattgccttaggcaacaatattgttgcctaaggcaaccattcgagcatttcaacatgtccacccccttgcttgtcgaacgcgccggcatcgtgcgcggcttcaatcgcttctacacccaccagatcggcgtgttgcaggaacacctgctgcaaagcgattactccctcaccgaaatccgcgtgatgtacgagttgtcctcccgaggtgatctcaccagcgccgacctgtgccagatgctcggcctcgacgcgggttacctgagccgcctgaccagtggttttgaaaagaaaggcctgatccagaaagtccgctgcgccaccgacgcacgcgccgtgcaattgcacctcaccgaccacggccgcgccgtgctggcgccgctggagcagcaaacccagcgcgaagtcatcgcccttctcgacagcctccccgagccacaacagcagcagctcaccgcagccatgaaacgcatccaggccctgctgcaaggcacggcgcccagctacctgctacgcgacccgcaacccggcgacatgggcgtggtggtgcagcagcaaaccgcgatctacgcccgtgaatacggctggaactgggagttcgaagcgctggtggcggagattgtcgccaagtacttgcgcgagtttgatcagacctgcgagcgttgctggatcgcggaaaaggacggtgaggtggtgggctcggtgttcgtgatccgccatgaccagaccacggccaagctgcgcatgctctacgtggatgccagcgcacggggcatgggtatcggccagcgcctggtggatgaatgcgtacgctttgcccgccaggtgggctacacacgcatgctgctgtggacggtggacatcctcaccgacgcgcgcaagctgtatcagaaagccgggttcgagttgatagaggaagagccgatggtcagcttcggtaaaaccctggtcagccagacctgggctcgccagctgtgaaacagtcccgcgccagggcggcgcgggacatgacgccttacaggtcagtgatttccttgtggcgcggcaccagcgttttcatcacgctccaggccaccaggtaggccagcgcacagatcgcgaacatgatcatgtagccggtatggatgtcgttgatggacttgtagtagtcgaacacccagccgccgatcttggtcatcaccacgccacccaggccgccggccatgccgccgataccgaccaccgaggccacggtcttctgcgggaacatgtcggacaccgtggtgaagatgttgcacgaccacgcctggtgcgccgaggcgcccacaccgatgagcattaccggcacccagaagctgatatagcccaacggttgcgccagcaagaccaccagcgggaacaacgcaatcaccagcatggctttcatgcggccgtcatagggtgcatcgccgcgcgccatgaagtagctggggaaccagccgccaccgatgctgccgaccatggtcatgctgtacagcaccgccagcggcatgacgatatccgcgcctttcatgccgtactgcgctgacaggtaggtgggcagccagaacaggaagaaccaccacacgccatcggtcatgaacttgccgaaggcaaaggcccaggtctggcgataggtgagcaacttgagccatgagacctttttctccacggcgctggccgctaccggggtgaagggctgcacggtctggtcgctgcggatataggccagttctgcggccgacaggcgtttttgctcctccggctttcggtagagcgcgatccacaccgcgacccacacgaacccgagcccgccgattacgataaacgccgcttcccagccccacagaccggcaatcaaaggcacgcagatcggcgccaggatcgcgcccacgttggcgccggagttgaagataccggtggccagcgagcgttctttcttggggaaatactcggcggtggccttgatcgcaatcgggaagttgcccgcctcgccaatcgccagcaccgcacgggacagcatgaagccagcaatcgacaccgggatcaccgccaggccaatcgcaccgctgatggcggcgatgccctcgcccatcggcaccgagaacgcatgcatgatggcgcccgtggaccagataccaatcgccaccacataggccgccttggtgccgatcttgtcgacaaagcgcccggcgaacagcatcgagatcgcatagacaaactggaacaccgccgcaatgttcgcgtagtcggtgttgctccagccaaattgcgtggacagctgcggcgcaagcaggctgagcacctggcggtcgaggtagttgacggtcgttgcgaagaacagcatcgcgcagatggtccagcgatagttgcctaccgcttggccaacgcggtgcgcgtggatgggctcgttcaagttcatggcatcactttttatttttgttaggtaggacatatgtaacgtcatatgtcgtcgtacaactgcgacttttatatccggccgcctaccggctgtcaatctgaaagattgccgtttatcgaggtattgcgagggtcattgaaaggtcaggtctatgcagttgtaggatgacaaatgcgcatgaccaggctgggcgccttgccccgtacatcgtcgagcacgccaaacggctgcatgccgatcttttccagcacccggatcgaggccccgtgatccggtcgcaccagcccgaacacctcgggcaaccccaggctgtcgaatgccagcgccaacgcgtcatgccccaactcggtggcatagccctgcccccaggcttccaccgcaaagcggtaacccaggttgatgcgccgctcggtcaggtagtcgaggggcgcgataccgccgaagccgatgatgtggtccggcgcctcgcgccgtgcaatcgcccaccagccgtacccttgggtcacccactgtacgagccagtgatccagcaggcgttgcgccacctccaggctggccatggggccagacgggttgaacaaattggtctgcgggtcgccgaagatcgcgaacaatcgctgcaggtcgttcgcttgtggttggcgataggtcaggcgtgagccggcggacatgcggattactcctctgtggctgtagtgagcgggcttgccccgcgctggggcgcgaagcggccctaacaccaagcaccgcattttgtctgaagaaatgcggtgattacattggggtggctgcgccacccagcgcggggcaagcccgctcaccacaacaggtccgctcaccactaagcccgctcaccgcaaagaatgcaaaaaaagcaaaatacgggtgaattatttcatgtccacttgtatctgaagtgacagagcggtgccatcgcagtgatggcgcctcccctgttctgctttagagtgccccgcatgaaattacgtaagaaaagcgtcaagcccatcggattgaaagacatcaccatcgtcgacgacaccaaggtgcgcaaggcgattaccgccgccgccctgggtaatgccatggaatggttcgactttggcgtctacggttttgtcgcctatgtgctgggcaaagtgttcttccccgacgcctcacccagcgtacaaatgatcgctgcactcggcaccttctcggtgccgttcctgatccgccctctgggtggcctgttctttggtgcactgggcgataaatacgggcggcaaaaggtcctggccgcgaccatcgtgatcatgtccctgagcaccttcgccatcggcctgatcccctcctacgcctcgattggcatctgggcgccgatcctgctgctgctgtgcaaaatggcccagggcttctcggtgggtggcgaatacaccggtgcgtcgatcttcgtcgcagaatatgcgccggaccgcaagcgcggcttcctcggcagctggctggacttcggctccatcgccggcttcgtgctgggcgccggcgtggtggtgctgatttccagcatcctgggcgaagccgacttcgagtcgtggggctggcgcctgccgttcttccttgccctgcccctgggtatcatcggcctgtacctgcgtcacgccctggaggaaaccccggcgttccagcagcacatggacaaaatggaacaaggcgaccgcgaaggcctcacccacggccccaaagtctcgttcaaggaggtcgcgaccaagcactggcgcagcctgctgacctgcatcggtatcgtcgcagccaccaacgtgacctattacatgctgctcacctacatgccgagctacctgtcccataacctgcactacaaagaaaacagcggcgtgctgatcatcatcgcgatcatggtcggcatgctgttcgtgcagccgttcatcggttttgtcagcgacaagatcggccgcaagccgttcatcatcgccggcagcatcggcctgctgttcctgtccattcccgcctttatgctgatcaccagtggcaaaatcgggctgatcttcgccgggctgctgatcctcgcggtgatcctcaacttctttatcggcgttatggcctcgaccctcccggcgatgttcccgacccacttgcgctacagtgcattagccagcgcgttcaatgtctcggtattgatcgccggcgttacgccgaccgccgtggcctggctggtggaaagcaccaacgacctgtacatgccggcctactacctgatggtgtttgccgtggtcggcctggtcaccggcctgaccatgaaggaaaccgccaacaagccattgcgtggcgccgcaccggcggcgtcggacatggaagaagccaaggagttgttgcaggaacatcacgacaatatcgagcagaagatcgaagacatcgacgccgagattgccgaactggaagccaagcgtcagaacctggtgcagcagcatccgcgtatcaactaaggcctgaccctgcatggcggccccagccgccgccatgcttttggagagttcaaccatggttccaagcgtcaccgcaccacagtcgttgctcagcgcagatgaacgcgccgccatcgccgaaatagaagccaccaccagcatcctgcaactggtcacccgcctgaccggcatgcgcttcgccggcatcgccaaattcaccgacctggaatgggtggtctgctctgtgcacgacaccgtcgacatgggcattcacgtcgacgacgtactcgacctggaaaccacgctgtgcagcgagttctgcatcaacccacagaccctgttcatcccgcagatcagccagagcggccgcttcgccgcgcgcccggtggtcaagcaattcgccatcgaaagctacgctggtgcaccgatcttcctgcccgacggccgtctgttcggcgcactgtgcgcgctggattcacgggcgatgctgttcgaagaccccaacctgccggaaaccctgagcctgtttgcgcggctgatcgggtgcattttctttgccaacctgacgccccgtgacacctgatcgttcagcttttcaagcgcgctgccgatagcctgggatacccctgacttgcagcgctgccctgcgggaaacaatgccgaacactctcgccccgatcgtccgtacgctctccaaccgcaccagtctgtcgctgacacgtacctccctgttcaatttcacggccctgttggtcctggtctttgcagcggcagcttattcgctgatctacctggcccatgaactggaccacgccgagcaagaggaaagcgcgttttacacgcgtaaagccgtgcagtccctggaaaaatccttgcgggtcaccgtcaaggactacgccttctggagcgacgcgtacaagcacttgcacctcaaggtggacaccgattgggcctacggtcgcggcaacatcggcgccacactgttccaggatttcggcttccagggcctgttcgtggtcaacgatgccaaccgcacggtgtacgccgtcgtcgaaggccaactgcaacccattgacctaagcgactggcttgcccagcccatcacgcacgtgctggaacaggcacgcgccggggctgagcaggagctgccggtcaccgcttttatcaacgtgcatggcagcccggcacttgtggctgcagccgccatcacgccaggcaccgaccccacggtgaagatggatgggcgccccgcatcggtactggtgtttgtcgacatcctcgacagcgcccaactggccctgatcggcaatgatttcggcgtcaatcaactgcatatcgccagcgccgatgagatcggcaagaccttgctggttcctctgggcgacaacggtgctgccggcagcctgcattggcagccagcgcgcccgggtgtgcggttgatgggcgtgggcttgccgctgctgggcctggccgcgttgctggtatgcctgatgacctgggtgatcctgcgccgcgccagcgccgccgccctcgccctggatgccagccacgcatcgctgcaagacagccaggacgcgctgaccaccagtgaagcgcgctttcgcgatgtggtggaagccagctccgactgggtctgggaaatcgatgccggctggcgcttcacctacttgtcggagcgcttcgagaacgtgaccggcctggcccgccgtgcatggatcggcgccgccatcaacgacctcctggacaccgaagccggcgcgctttcgcaatggctgaacacccccagccgcaccgcggacatcagcgtgcagtgccgctatgtcgacgcccacggccaggaacgcaccacacggcttgccgcgaggcaaatgccctgtggcggcttccgtggaaccgccaccgacgtgacggaggaagtcgaggcccggcgccgcatcgaattcctgtccgaacacgacgccctcaccgggttggccaaccgcacacgcctgcaagcgttcctcgacgacaagctcaaggcgctgccagcgtcgggccaaccgttggtcatgctcagcctggacctggaccgcttcaaaccggtcaacgatctgctcgggcacgcagccggcgaccacgtgctcaacgaagtgtcgacccgcctggccgattgcgtgcgccacggcgacctggtggcacgggtgggcggcgatgagtttgtgttgatcctcacgaatgcgggcacccaggacgatgtcgagtccctgtgcctgcgcttgatcgagtccgtcgaacaggcggtcagggtcggcgagcaggaagtgttcgtcagcgcgagcatcggcatcgtgctggcccccgatgatgccagcgaagtcgccgaactgctgcgttatgccgatatcgcgctgtacgaagccaaggcggccggccgcaatacctggcggttttactcgggggagatgaatgcacggatcatcgagcgtcgccgcctggaaagcgacctgcgttttgcaatcaagcacaatgaactgcgcctgcacttccagccgcgctatcgcattgccgatggacagatggtcggtgccgaagccctggtgcgctggcaacacccacagcgcgggctgatttcacccgagaccttcatcccgattgccgaagagtccgggctgatcctggcgctgagtgactgggtgctgcaaaccgcctgcaccagcgccgcccagtggcccgaggcattgtttgtgtcggtgaacctgtcgtccacggagttcaagcgtggcgacctggtggagcgcattcgcaatgccctcacggcgtcggggatcgagccggcgcgggtcgaactggaaatcaccgaaagcgtgatgctcgaagacgcggcgggcgcactggcggtgatgcacacgctcaaacgcctgggcatacgcattgccatggatgacttcggcaccggctattcctcgttgagctatctgcgggccttccccttcgacgggttgaagatcgaccgcagcttcctcagccgcctcgaagacagtgaggatgacaaggcgatcatccaggccatcgtcggcctggggcgtgccctggcattgacggtgaccgccgagggcatcgagaccgccgggcacctggcaatgctccgggccgtgtcctgcgatgaaggccagggctattacctcagccggccactggatatcgacacgttcaacgggctgctcggcactagcggaaaaactgactcggcgtcttgccaaactgtttcctgaacatgctggtaaacgcactcgggctgtcgtaacccagctccagggcgatatcgatcaccttctcgcccaccgcaatgcgttccagcgccagcagcaaacgtgcctgttggcgccattggccgaaggtcatgccggtttccttgcggaacaggcgctggatggttttctggtccaagtgcaggcgttcgctccagtgcgccacggtggaggcgtcgcccggctcttcctgcaacgccaggcagatgcgctgcaggcgcgggtcggcgggctgcggcaaggacagcggcaacgccggcaggatcgccagttcgtcgaggatcaggtgcatgatccgcgcatcccgtgagtcttcggcgtacggcggcttcaggctcacggacgccttgatcagctcgctcagcaacggcgagatactcacggttttcggctcgccgggcatattcgggaagcgatccgggcgcacaaacacgctgcgcattttcagggtgcctacgcaacgcagggaatgcacttgcccggcgggcatccagatgccacggttgggcggcacggtccactggttcagcgccgagtacaccaccatcacgccttcgatggcgtagagcagttgatgcttctcgtggctgtggtcggggatcacccagttttccgggtaatcggtggcggaactgatgacggcccaggcgccttcgttgatttcctgaagaaattcatccagtggtttgatcatttcgcccttttcgcgatagttgccgccccaattgcgtgagacaggcattcctgacaaatctagcatgaacgccgaatcattttgtaatggatggcgaccttaagaagttgccgcctctgattagctgccttgtatggaatgcctgcatgtcgacccttaccgcgtcacccgccgctgcaaccactacgccccaggccagccccttggtcatgcgcatcctcggcgcctgcgccctggcccacttgatcaatgacctgatccaggccgtgctgccgtcgatctacccgatgctcaaggccaactatggcctgacattcacccaggtcggcctgattaccctgaccttccagttgaccgcctccctgctgcagccgtggatcggctatcacaccgaccgccaccccaaaccctggctgctgccggcgggcatggtgtgcaccctgatcggcatcctgatgctggcgtttgtcggcagcttcccggcgatcctgctggcggcgggcttggtgggcgtgggttcgtcgaccttccacccggaaacctcccgcgttgcgcgcctggcctccggcggtcgctacggcctggcgcagtcgaccttccaggtcggcggcaacaccggcagcgccttgggcccgttgctcgccgcggcgatcatcatcccctacggccagggccatatcgcctggttcgggctgtttgccgtgttcgccatcctggtgctgtacggcttgagccgctggtaccgccaccacctcaacctgttcaagctcaagcaaggcggcaaagccacccacggtttgtccaagggccgcgtgacctttgccctggtggtgctggccgtactggtgttctccaaatactggtacatgaccagcctgaccagctacttcaccttctacctgatcgagaagttccagctgtcagtcgcaagctcgcagatgtacttgttcctgttcctcggcgcagtggccgtcggcacctttgccggtggcccgatcggcgacaagatcggccgcaagaaagtcatctggttctcgatcctcggcgcggcgccgttcaccctggccctgccctacgtcgacctgttctggacggcggtactcagcgtggtgatcgggttcatcatcgcgtcggccttctcggccatcgtggtgtatgcccaggaactggtgcccggcaacgtgggcatgatcgccgggatcttcttcggcctgatgttcggcttcagcgggattggcgcggcgctgctcggcctgctggcggacacccacggcatcgagtacgtctacacactgtgttcgttcctgccgctggtgggcatcctgacgatcctgctgccctcgaccaagggcgcctgacctgccgatcatcgcctggccgtgtgctatcacccggaatgctctgaaaaacctgcgtgtgcgcttacaatcccggttctaaacgcacaccaggcagacccggcaagacatgacgctcgaccctcccacgattttggcactcaccgttgccctggcagccgctgccgccctgtacctggccgttgaatggcgcagcgtgcgcgaaccttcgctgctgtgctggagcgccggtttcgccaccattaccgtcggttccaccctcgccctgctgcgcctcaatggctacctgatgatcggcatctggttcgccaacggcttgctggtgaccgcgcacttcctgtttttgctcggcgtggcgcggttcacccaaacgcggctgtcgcccatgtggttgctgatgctgctggtctggctgggcatgctgatgttgccggccgatccgtcatggtccaaagccatgctggcggtgcagtccctgttagtagcgctaccgaccctgcgcgccagctttttgctgcggccccatggcaagtcgctgagcatcggcgcggtgcagttgcgctacgtgctgctgatccatggcgcgttctatgtggccaaggcgctgtcggtattgatccccggcaccttgatcgacctcgccgccttcaagggcgagatcatccagatttccctggtggaaggcgccatggcgatcatgctcatcgcactgtcgatgaccggctccgagcgctatcgtcgcgaacaacagatcgcccgcctcgccgcccgcgacccgctcaccgccctctacaaccgccgcgccctcgacctgcgcgccccgcgcctgctcgctcaggtaacgcccgcacaaccgggcgccctgctgctgatcgacatcgacaacttcaaatcggtcaacgaccttcacggccacactgccggcgaccgtctgctgatcgccctcagcgaaatgatccgcagcgtagtgccccaaggcgcgctggccgcacgcctgggcggggatgaattcgtgatcctgctcaacccggcgtccaccgaacagatcgtcgaactgggcagcagcctgcgcgaccagttccagcaactggccgcgcagagcttcaccacgccggcgccggtgacgctgagcattggcgcaaacctgttcgaccaaccgccgccgagtttgacggcgctgatcgagcaaggggataccacgctgtatgaaaccaagcgcggtgggcgggacagtattcggttggtggatcggacggggtcgagttcgtacggctaaaggtcgtaactcaccgccacactgcgcccggtcctcaccgactccaacgcacactccgccaaatgcaacgcatacaacccatcccgcacgctggtgggcaatgccgtgccgttattcagcgcatcgatgaactgcgccagctcattgcgatacgcatccgcataccgttccaggaaaaagtgctgcaacggttccagcgcctcggtgtgttccgcgctccagtggcgcagggtgctggggcggtggttgtcggtgagcagcacgccggtggcgccggagacttcgacgcgctggtcgtagccgtacaccgcctggcggcagcagttgatatggcattgcttgccggaggcggtgcgcagcagcaccatcacgctgtcgtagtcgtcgatttcggccaggctcgggtcgaccaggcggctggcgatggcgctgacttccaccggctcttcgccgagcaggtggcgggcggtgtcgaaatcgtggatggtcatgtcgcgcaggatgccaccggagtgggccaggtagtcacgcggcgccaggccggggtcgcggctggtgatgatgacttggcgcaccgcgccgatctgcccggcgtcgagggccgcgcgcaggcgcagcatgtcggggtcgaaacggcggttgaaaccgagcatcacgcgaccgccctggcgctccaccgcctgggcagcactgcgggccttggcgatatcaaggtcgatgggcttttcgcagagcaccgccttgcctgcggcgacggctgccagcagcaggtcgatatgcgtgtcggtaggcgtaccgatcaccacggcgtcgatgtcattacgggtgagtacggcggcgcaatcgtaggccgcctcgcaccccagttgggcactcaacgcatcgacgccttcgcgccaggggtcagccaccagcaccagcgtggcattgggatgggcggcgacattggcggcgtggatcctggcgatgcgcccggcacccaggacggcgattctcagcatggtcgaactcctgatgttgttattgagggagtaatcagtcgggcaggttgaacggcgtgacgatctgcacctgggacggtgcaatcggcccggccttccagagccggtggtagtgcaggatgtgcaggaacacgtggcgggcatcgatctgcaggttgtgatcgataatcgcggcgaccttttcttcgcgcagcaactggcggttttcttcgtcgaggtcgtggccgatgaacacctcaaggggccgatcgaaggcggcgaacgcatcgacaatcgcgcggttgccgccgccgacgctgtacaccgccttgagctcgggatgctgttgcaacgcctgggtcacccgctcgaaggtgcggtcgtacacgccgtagccgccactgacgtcgagcacccgcaagtgcgccgcacgcccacgcagccaggcccgaaagcccatctcacgctcttcttcaccacggaacagttcgctgccgatcaccacggccacgtcctgaggctgcgccggcagccaacgcgacatcaggtaggcggcagtctggccggcggtgcggttgtccatgccgacgtagccgatgcgctcgctttgcggcaggtccgtgaccagcgtcaccaccggaatccccgccgcgatcagttgcttgaccgccaggttcaccgccggctcatcggcagccttgagcaccacgccctggctgccggtgtccaggcagcgcagcagttggtcgtgcatggcctggggttcgatctcttcaaacaggtgaaagcgcggggcaatgcggaacggcgccaggctgcccagttgcgcgttgatcgccgtctgtaccgccgtactgaagcgcttgggcgtgtgcatgatcacatcgacgtggaacgtgcgccctaccgccaggccgtttttctcctgggactccagctcctccagcgcctgctcgatacgccgccgggtctgggcatgcacgctgccgcgctgatgcagcacgcggtcgaccgtagctttgctcacaccggcctgggtcgccagttgcttgatggagaagtgtttggcgcgttcgagcatggggcctcacttgaggtatttttgaggtgttttttgggtattactgaggttttgcaatgctagtctcagttttgtccggcgtcgagccgggcgatgaacaacaacaaaagttccgggagaactgcatgcctaacaccgatctcgccacgtcgttcagcggccaatattttgtcgtcaccggcagcacccagggcctgggcgcggcggtggcccgtaccctggcaagccgtggcgccgccgggctgatcatctgcgggcgtcggcgcgcccagggcgaagagcaggtgcggctgttggcccaactggattgccaagcgatatttgtcgaggcggacctggagaaggtcgaggactgccgcgcaatcatcgatgccgcgcgtatccatttcggcaccctgcatgggctggtcaactgcgccgggatgtcggatcgcggcaccatcctggatacctcccccgagctgtttgatcggctgatggcggtgaatgtgcgggcgccgtttttcctgatgcaggaagcactgaagctgatgatcagcaacggggtagaaggcgcggtggtgaacatccagagcgtcaccgggcatggcgggcaatccttcctgagcgcctatgccgcgtccaagggcgcgctggcgatcctcaccaagaacgtggcgttcagcgccctgcgcaatcgcatccgggtcaatggcctgaacatcggctggatggacacaccccacgaagatgacatccagcgccagtaccacggcgcccaggatggctggctggaaaaggccgaaagcgcgcagccgttcgggcgtctgctcaaacccgaagaagtggcgcgcagcgtggccttcctgctgtccagcgagtcgggaatgatgaccggctcggtgatcgacctggaacaaggcgtggtcggctgtaccgacggcggcagcccgcaaccgaatcaggcgctgggaggtgtgtgatgtcggcgttcgtgacggaacaggccgtgcgcctggcggacttcagcgagatctgtgcgcaacgcgtgagccgagaggattaccctctgtgcgctgaagttcagagcaatgtgccgatctatcaggcccacaccctgcgcaatagcgaccgcctggcggtgatgaatgaactgcaccgcctgttccgcgaggggcctggggtgatggtggtgcgccgggcctacgaagatctggaagtggtcgaccgccacagccaggtgttcgaggcgatcttcgcccaagaggcggcgcagggcgtggcagccgaccactttgccaaggccggcagcaacgggcgcatctggaattcattgcagaaagccgcgttgcactcgccggcgtcgtttgtggagtactacgccaacccgctgctggggttgatcgccgaagcgtggctggggccgagctaccaggtcacggcgcaggtcaacgtggtgcatcccgctggccaggcccagcaaccgcaccgtgattaccacctgggctttcagaccaatgatgtagtggagcgctttcccctgcccctgcacctgctgtcccagtacctgacgttgcaaggcgcggtggcgcactcggacatgccgctggaaaccggcccgacccagttgctgccgttttcccagcaatacgccctgggttacctggcgtggcggcgcccggagtttatcgactacttccagcagcacgccgtgcaactgccgctgcacaagggcgacctgttgttcttcaacccggcgctgttccatgccgccggcaccaaccgcacaaccgaccgccaacgcatggctaacctgttgcaggtttcctcggcgttcggcaaacccatggaagccctcgaccgcgaccgcatgatgctggcggtgtacccggcgttgctcgagaacaccgcactggatgcccaggccgtggcatcggtgattgcctgcactgccgacggttatgccttccccaccaacctcgacaccgacccgcccttgaagggcctggccccgcaaaccgcgcaacaactgatgcagcaagccctcgacgaacgctggccactcccggactttgccgctgccgtggagcagctgcgaaccaagcgtcaagcgtgaaccctctgtttcaacaacaacaaaaacaacggagcaccctcatgaagaagcaactccttgcgacactcctgaccctggcgataagcccctgggcgctggccgatatccgcatcggcgtgagcatcgcccaggtcgacgacgtcttcctcgcgcagatgcgtgactacatggccgcccacgccaggcaactgcccgacgtgaccctgcaattcgaagacgcccagggcgacgtggtgcgccagctcaaccaagtgcagaacttcaccgcccagggcatggacgcgattatcgtcaacccggtggacacggccgccacgcaaaagatgaccgccaatgcccagcaagccaagacgccgctggtgtacgtcaaccgccgcccggatgcccagcagttgccaccgggcgtggggtatgtgggctcggacgaggtcaaggccggtgaaatccagatgcgctacctggcgcaaaagatgggcggcaagggcaacctggcgatcatgctcgggttgctctccaacaacgccacgcacaatcggacgctgggggtgaagaccgtgctcaaggagtaccccgacatcaagatcgtcgaggaacagagcgcggaatggcagcgcagcaaagcgattgacctgatgaacaactggatcgtatccgggcgcaaaatcgacgcggtggcggcgaacgcggatgagatggcgatcggcgcggccatggcgatcagccaggcgggcatgcagccgggcaaggatatcctggtagccggcagcgacggtggggctgccgggctggatgcggtgaagaaaggccagttgctggtgacggtgtatcaggacaacaagggccaggccgtgggctcgattgacctggcagtgaagatggtgaagaaggagccgtacacggctgaactgaccattccctatcaacagatcacccaggacaactaccaggccttcctcaacccttgagccgaacgaacctgttgtggcgagcgggcttgccccgcgttgggctgcgaagcggcccctttcaaaaccgctgcggtgtttcagttgaaccgcgacatcagttattggggctgctgcgcagcccaacgcggggcaagcccgcttgccacaacaggccctctcaccagagggagtttgcctcaaccggtcttctcgctgaacggttcaagcccattcaccaccagataaagcaacggccccaccgacacaaacaccgccgtcagcacaaagtacggcaccaccgaaagtaccgaacgcccccgccgccgcgcatcccggtacatccacacgcacgccagcagcgccatcaaatacaggtcgatcaccacttgcgcggtgtccggtcgcgacatcaattcgcgcccgaacgccagcagcgactgctcggccgtcagcagcgtgaacagggtgtatgacgaaaacagcagcaaaccgaccagcgcaacacgggatcttttcatgggttgttccttggggtgatcaaggcccacgttagtgataaggttcggcccctcgcaatgacctcggaggtcatgattccgccatggacacccctgccaccgccggcgaacagctgcgccacttgcgccggcaagcccggctcagccagctcgacctggccctgatcaccggggtgtcccagcgccacctcagttgcctggaaaccggccgcgccaagccaagcccgggcaccttgcacaacctgctgacggcactggaggcaccgctggaccagcgcaaccgggtgttcctcgccgccggctacgccccgcgctatagcgccacgccactggcctcaccggcgatggccgcgattcgcgaagcggtcagccatgtgctgcacgccaacaaccccgcgccggccatcctgctggacagccagtggcaggtgttggcggcgaatgccagcaccgccgtgctgcttgaactggtgggcatcccgcccgattcagccgagggcttaaacctgctcaccacgctgttgcagtcgggcggcctcggcgatcacctgaccaatgccgacgagatccgcaccctggcctggcagcgcgccacccgtgaggcgctgggcaatcctgaactggccgccctgctggcgcgtttgccgacgccggccagcaccgagttgcccgccgacatgccgccgctggtactgacgcgcatccgttcaagccggggcgaattgagttttctgtccaccttcaccaccttcggcatgcctcaggacattaccctctcctccctgcgcatcgaacatctgattcccgccgacgacgccacctggcaggtgatgcgcgcggcctatgcgagttatgccgcgctggttttgtgaaatatctgtacgtagactgccgccatacccccacctgaaggcggcgaaaaaaacgtgatgcaagttaccgaagtctccattgcccaattgcgcgcggcgcttgaatccggccagaccacggccgttgaactggtaaaagcctacctggcgcggatcgaggcctatgacggtccgcacaccgccaccgccttgaacgccgtggtggtgcgcaaccccgcagcgctcgaagaagccgaggcgtccgatgcacgccgggacaacggcgaaaccctggggcctttggatggcattccctacaccgccaaggacagctacctggtcaagggcctgaccgcagcgtccggcagcccggcgtttgccgacctggtcgcccagcgcgatgcgttcaccatcgagcgcctgcgcgccggcggcgccatctgcctgggcaagaccaatatgccgccgatggccaatggcggcatgcagcgtggcgtgtatggccgggcggaaagcccgtataacgccgactacctgacggcgccgtttgcttccggctcatccaacggagccggcactgcaacggcggcgagctttgcggcgtttggcgtggccgaagaaacctggtccagcggacgcggcccggcgtccaacaatggcctgtgtgcctacaccccgtcccgtggggtgatttcggtgcgcggcaactggccgctcacgccgaccatggacgtggtggtgccgtacgcgcgcaccatggccgacctgctggaagtgctcgacgtggtggtggccgaagacccggacacccgtggcgacctgtggcgcctgcaaccctgggtgccgatcccgagcgtcacctcggtgcgcccggcgtcttatgctgacctggccgtgactgccgaatccctcgccggtaaacgctttggcgtgccacgcatgtacatcaatgccgaccccgacgccggcaccagcgaaaaacccgggatcggcggccccaccgggcagaagatcaacacccgcgccagcgttatcgacctgtggaacgacgcccgccaagcgttggtggcggccggcgccgaagtgatcgacgtggatttcccgctggtgtccaactgcgaaggcgaccgccccggcgcgcccactgtgtttacccgtgggctggtgtccaaggagttcctgcacgatgaactgtgggaactctcggcctgggccttcgatgatttcctgcgcgccaacaacgacccggcgctcaaccgcctggcggatgtggacgggccgaagatcttcccccacgacccgggcaccctgcccaatcgcgaagacgacctggccgccggcatggacgaatacgtgcgcatggccgagcgcggcatcaccccgtgggaccagatcagcaccctccccgacggcctgcgcggcctggaacaaacgcgccgggtcgacctggaagactggatggacaagcttggcctcgacgccgtgctgttccccaccgtggccgacgtaggcccggcggatgccgatgtgaacgaagcctccgccgacatcgcctggagcaacggcgtgtgggtggccaacggcaacctcgccatccgccacctgggcgtgccgaccgtcaccgtgcccatgggcgtgatggccgatatcggcatgccggtggggctcacctttgccgggcgcgcctatgatgactctgcgttgctgcggtttgcgtcggcgtatgagtcgaccggcagcaagcgcctggtgcccccgcgtacgccggcgctttaactcaaggcatgggcacggcaatcaacaggattgccgtgccatgggccagcgtcgccgccagcacgccataacgcatacgcaccagcgcgcaagccagcccttccagcagggtaaacagcaacaccggccaccccagttcagtcacgctcaaggccaggaaagcatggcaggccgcaaaagctacgccgctgatcagggccgcacgcaacggcgctacctgctgctccagatagccctgcaaaaacccacgaaacaacacctcctccaacgcattggcgccataggccaacacgaccatgcccggcagccatacccaataacccacaagcgctgacgcttcgatgccctggtacaaccgcagcggcacaccgatcaagccaccaaccgcgagcccgatcatcagtcccgcgacacgcggccccctggaccagacgatcagcgccgccaagtcaggtgccacccgcacaagcgccgtaatcaataacaccgataaaccacccaatgctgccagcaccaaggtgttggccgtgaaggcaagctgcacctcgctgcccagcgaccacaagcccaacggcgtcatcacatcgcgcatcagcacgaacgccatcaacagaatcaggatgcgcaacgccgtcagcgacttgggcgtgagcgcgaaccacaggccgaacaacagcagccccggtgccaggtacgtgctgtagtggatcaataccaccatgccttgggtaatcatcgatcgctcagccgtgcgccagcgcaatcatttcgatctccaccgccgccgacttcggcagctgcatcacgccaatcgaggtccgcgtatgcaccccggcgctgccgagaatctcgtgcaacaggtccgacgcgccgttggccacttcactctgctgatcaaaatcctcggcactgcgcacgtacacggtgatgcgcgggatggccttgatctggtccagcgaacccagggcctgctggagcaaccccaggcagcgcaacgcgctgatgccggcggcgacttgcgcctgggcgagggtcaggctgtcaccgaccttgcccggcagcacgatggcatcgccgacacgcgggatctggccgctgatgtacaggtggttgccatcgcggaccagcggcgtgtagttgccaccgatcttgaattcattcaactgatagccgatgcgcagctgggcggcctggtatttttcgtcgcgggtcatgggcgtgcatcctcgttgcgacgttgccactcatccaccacgtcgcccagggtcttgggcctatcgttgcgaatccaggccatgaagggccggtcgaacttgaaccctgggccgcagtgctcaagcatgaagcggcgaacgttctgagtgtttttgtagtggggggtgacgggggtgtcgcgggtgatggggtcgctgtgccagtcaaaatccatgttgtctctcgggcgccgtggggtttcggcgctagcatagcgatgtgctacctgcacaggaagtgagctgtgattcaactgatgtgttgagacatcgcacaagataaaggcttgcttatattgccttaaagcccagccctttcaaggtctttgaaaaaacggccatacctgcctgataccctcccatcaagggtgaacactacaactgtggcgagcgggcttgtcccgcgttgggctgcgaagcagccccagcaccagcggcctaagaatgcctggttcagcgcatttccccttccagggtcgcttcgcaacccaacgcggggcaagcccgctcgccacagaagactcatcgcctgttctatctgaagaccttgaaagggctgacctcagtgccgaaacttttctggatatttcaaaatttcactttccttccccctctgaaatattgcatggttgtacgacgacttaccccgtcgtgccagcccccaacaacaataaggaaacacccatgcaaaacgtcaaagtgctgatcggctttctgtgcctgttcagcggctatgtcgcagcagcgcctgcccctgccgaaaaggacgtggcccaagcggtcgaccaactgacccaggccatgctgcacctggacctcaagcaacttcacgcgctgacgtccgacaagctcacctacggtcactccagcggcaaggtgcagaacaaagaccaattcatcgctgacctggaaacccacaccagcgcgttcaagaccctggaaatgcagaaccagaccatcaccctgcaaggcgacactgcactggtgcgcaaccacttccacgctctggccgttaacagcggtgtagaagtgcccaccgatatcgacaacttccaggtctggcagaagcaaaaaggcaaatggctgctgatcggacgccaggcctacaagtactgatgcccagcggtgagccgctgaccccggctcaccacgccaccaccgtgcgcaccttcaacaacgcctcacgcagcgccggcagcgccaccgagcccaaggccaaacgcaacgcatgcggcacatgggtcgacacggcaaatggctcggcggtagacacggaaatgccctcgcgctgcaagctcatggccacctgatcggcccgcgcctcgtccgccaggggcaaccacaggaaatacgaagaaggatggctcacgtacgccagtcccttcagcacctgcgccgccaaggcctgccgcgcctgggcatcctggcgcttttgtgcttccagttgcgccaccgtgccatcctccagccaggccaccgcaatggcgctcatcacacccggcacgttccaggtggtggccatgagggtgcgctccagtggtttcacccattccatcggcgctgcgacaaacccgacccgcaacccggtcgcgacacttttcgacagcccgcccacatacaccgtgcgctccggtgccaatgtcgccagcggcggcggcgcgtcttcggccaggaacgcgtaggccgcgtcttcaatgattatcaggttgtgctgacgggcgatcgacaccaactgctcgcgctggctcatgcccatcacccagcccaatggattgtgcagggttggcatgctgtacaccgcgcgcaccgggcgcttgcgacacaggttgtgcagcgcgtccaggtccggccccaccggcgtgaccgggatcgcgacgatttccaggtgcagggtttcggccagcaccttgaaccccgaataggtcaaggcatccaccgcgatcacatcgccgggcttgagcaacgccatcagcgtcaccgccaggccgtgctgggcgccactgaccagcagcacctgctcggcgtccaccctgagcccgcgactgagtaagtgccgcgcaaccgccgcgcgctcatgcaagcggccggcatggggctggtaacgcaacagggcttcgaggtcgccgcagagcgccaactggcgcagcgccgtgcgcaacctatccgcctggccgggcaacgaagggtaattaaagttcaggtcgagcatgcccggcgccaccgtcatctgcccactgccctgccccggcggcagcgagatttcgcgcacgaaggtgccgcgcccggcttcaccgctgaccagccccatcccctcaagctccgcatacacccggctggcggtgactagggccaggccatgctcggcggccagttgccggtgggttggcagccgtgtgccgggcggcattgttccgctgcggatggcttgggcaaaggtatcgaccaacgacttgtagcgggcgcggggcattgggctgtatccatgacaattttttgattgtattaatcctcacctctaggatggctgcaacgcaacccctccttgtccggacgcctgatcatgcaacgcacctcctctcttgacaccctgaatggcagcgcccaaggctggatcaacggctttatgggcgtggtgatcttcagtggctccttgcccgccacacgcctggccgtaatggagttcgacccggtcttcctcaccatgattcgcgcggccatcgccgccctgctgggcgtactgctgctgtggctgttcaaggaaaaacgccccacacgccagcagtgggtgcccctggcaatcgtcgccctgggcgtggtgatcggcttcccgctgctcacggccctggccctgcaatacgtgacctcggcccactccatcgtgttcatcggcctgctgccgttggccactgcggtgtttggtgtgctgcgcggcggcgagcgtccgcgcccggtgttctggctgttttcgatcctgggcagtgggctggtgatgggttatgccttcgcccagggtttgagcgccgcaccggccggcgacttgctgatgctgttggcggtgctggtctgcggcctgggctatgccgaaggcgccaagctgtcgcgcagcctcggcggttggcaggtgatctgctgggcgttggtggtgtcaatgccggtggtggcgccgttgagcctggtgctggcgccgacaagtttgcacggcatcagcctgcccgcctggctcagcctgggctacgtggcgttgttcagcatgctgatcggttttgtgttctggtatcgcgggttggcccagggcgggatcgccgccgtcggccagttgcaattgctgcaacccttcttcggcctggcgctggcggcgggcctgctgcatgaacacgtcagcctgggcatgctgctggtcaccgtcgcggtgatcggctgcgtggccggtgcaaagcagtttgcccgctaacgctgcggcgcgaccatcttgaacttgatgttgatgtcattggacaccacgctgttgccggcccactcgccctcgccgatcctgaagtcgccgcgcttgaggatgaactcaccgtcgaacacaccaatgccgctctgctccttgagcaccacgtcgacgtccaccgggcgcgtggtgcccttgatggtcaggttaccgctgatctggtagcggttattccccaacgccttgaccccggtggattcatacacgcccaccgggtaggtcgcggtatcgaaccaggaggcgcgttgcagttcgtcgttggcatccgggctgccggcgtcgatgctggcgagctggatcttgagcaaggcatgcccggcttccggctgttgcgtatcgaaggtcaaggtgccctcgaagtcgctgaacgtgccatacacccgctgccccaattgcttgtaggtgaagctgatctggctggcggtgcggttgacgtccttgtactccaccgcctgggcgctggcgccgtaggcaaggatcaaggccaggacggcgaccggggacattcgacgtttcatgcaacgctccgcgacaggtaagaacacagtatcgagctaacacctcataccagggatttattcccatcgggcgtttgtcctgctaaacagagtagtcgccccacaacaataaggacgctgcatgcacgccccatcgctccaggacaccaccgcgccggaaggcatctgctacggctgcggcgccagcaacccccatggcctgcacatcaagagccgctgggacgcggacggtatccacctggtcgccgagcacctgcccgaggcaaagtacaccggctggcccgacctggtctacggcggcctgatcgcgatgcttgtggactgccattccaactggaccgccatggcctaccattaccgcgccgaacaccgcgaacccggcagcctgccgcgcatcgattgcgtgaccggcaacctgggcatcaagttcatcaagccgacacccatgggcgtcaccctcaccttgcgcgcccgcgtcgacggcgacgtggggcgcaagacccgcgtgatctgcgaggtgtacgccggtgacgtgctgaccgccgtgggcgactcgatcttcgtgcgcgtcgacaccgaccaactggccgctgccgcccatggccgtgacagctgatcctggtctacattgatggccaccgttaatcgaggactgcaccgatgactcatctcaccgcgaaagactttgcgcccgaactactggagctctacgacggctacgcccacggcaagctcaaccgtcgcgaatttctcgaccgcgccgccctgttcacctttggcggtctcaccgcctcggccctgctcgcagccctgagccccaactacgccctggccgaacaggtgaaattcaccgacccggacatcgtcgccgactacatcacctacccgtcacccaaaggcaacggcagcgtgcgcggctacctggtgcgcccggccaaagcggcgggcaaattgccggcggtggtggtcgtccatgaaaaccgtggcctcaacccctatatcgaagacgtcgcccggcgcctggccaaggccggctttatcgcgctggcgccggatggcctgacctcggtgggcggctaccccggcaacgacgaaaaaggcgtggaactgcaacagaaagtcgacccgaccaaactgatgaacgacttcttcgccgccatcgaatggctgatgcaccacgacagcagcaccggcaaggtcggcattaccggtttctgttatggcggtggcgtgaccaatgcggcagccgtggcctacccggaactgggggcggccgtatcgttctacgggcgccagccggaagccaaggacgtatcgcgcatcaaggcgccgatcatgctgcattacggtgagctggacacgcggatcaatgaaggttggccggcgtatgaaaaggccctgaaagcagccggcacaacctatgaggcgtacatctacaagggggccaaccacggttttcacaatgattcgacgccgcgttatgacgaagcggcggcgaacctggcgtgggaacgtacgctggggtggttccgcaaatacctggcctgactgccccctgtaggagcgacctcagtgttccagtgcatagcgccggcaatggttgaggtagccctgctcatggctccctaccagttgcaccacgctggtccatagccacgacggcgcatccagctgtttggagcggttctcctgcaataccgccatccagtccttgcgtgtatcgcgatccatctgccgggcatgggcgataccgaccacccgtgccaggtaaccggcggcgtgcatggcgtcgatctcgctcaactcgtccagttccagcttcatatcctggggcaacagttcacggatgaaaaaaccattgtccagcatgcgcgtcgccaccatgcgttcacccaaaccaggcgacagctggcgggcgccctccaccacccggcggccattgtcccggggcatcttcgcccgtgccgcacggggcgccgccgcgccgacggcctgtttgatatcgatcaggcaatattcctggtcatccttgtcgcccacgccgagcaaggcggcataacgctgcaggcccagggagctgcagcccttgacccaataggccgagtccagcaactcgaccctggcgtccttggggcggcctttgagtgacgtcaccaattgatggatgtcggccgaggcgcagagcgtttccagtgcggttttttcggcccgtgacagcgaccagaaatgcttgcccaagggaatgctcgggcgagcattttcgatgcgctcacgcgccaggttcttccaggtgcgctccaccgcgctgcgcatgcccgccttgacctgggacgggcgcggcggcgcggcgtcgggcttgtctttgaacgcctgttcgtagcccaccatcatttcttcgagcatgcgcgcactggtaacccccggcaggtccgagccgcgcgcagcggtggccagggacagcgccaggcgcaccaggtcgtgggccgggttgccgatcaccgtctggtcaaggtcgcggatatgcatatcgatgcggcccttgatatcgccggtaggccccaggttgccggcgtggcagtcgccgcagatccagatcgccgggccatggggcaagcggcgcccgctctggctgtgcagccattcgtagaattgcacggtgctgccgcgcacgtaggcgtgggcagagcgggccattttcaggttacgtagttgggtcaggtgcggcaggcgggcggaggggcgcggtatcttcatggaaaaactcagtgcaggtgttgcgatagagcgctggccctcgacaaatgtttcattatgtttcaaaaaaaaacgtttcaatcttccgcagccatgtcccgcaaccagcctttgaacgccagcatcgccgccgtctcggctcgcgactgcaagcgcgtcaaccagtaactgccggtggtgatgccgacatcgaacggctggcgaatcacatcactctccagttgccgcgcaaacatcatcgccggcgccaaggccacgccgaggccttgcaaggccgcctccatcatcgccagcgaagaatcgaacacaatgctgcgcggcagcagggtatcggcgggcaagccggcggcctggaaccacaggttccactcatcggcgcggtaggagcgcagcaaggtgtgtttcaagaggtcggccggtgcgcgtaattgctcggccagttgcggcacacatagcacgctgagcggagcttccagcagttcgcaggcatccgtgccgtgccaggcgccggcgccgaaacgaatggcgtaatccaggccttcggcggccacgtcgacacggttgttgtgggtcgaaaggcgcaggtcaataaacgggtagcgctgctgaaaatccgccaggcgtggcagcaaccagccgaccgcgaaggtgccgaccgccccgacggtaaggacctcgcggtagtgcccgccctcgaactgaccgagggtgtgagcgatgcggtcgaaggactcgcgcaacaccggcagcagggtttcaccttcacgcgtcagcatcaggccgcgtggcaggcgcttgaacaaggcgacattcagttgcgcctccaggcttttcacctgatggctgaccgcagcctgggtcacgcacaactcgatggctgcccgggtgaagctcaagtgccgggccgacgcctcgaacgcgcgcagggcattgaggggcaaatgggaacgcagcatggtctaccctagattttctaatggcagctgcaagatatcatcgtttgccgaagggaccgaacctgactagatttgccacgcctgcgcaggccccgatcgtcagtgcatcatttacatggaagcgaataaccatgaactccaacgtaagaaatttcctgatttcagccttatttatcagctccggcacctgtatggctgccaccgacctgcgccaggtcgtggacagcagcgtcgagcccctgatgcagcagcaaggcatcgccggcctgtcggtggcggtggtgaacaagggcaaggtgcaatactttaactacggcgtcgccaacaaagacaagcaacagcccgttaccgaagacacgctgttcgagatcggctcggtgagcaagaccttcaccgccaccctcggcggctacgctgcggccagcggcaagctgaagttgtcggacatggccagccagcatctcgccgcactcaagggcagtgccttcgaccgcatcagcctgctgcaattggccacctacacccctggcggcctgccactgcaatttccggacgccgccgacagcgccgacaccatgctcgaatatttccagcactggaaacctgtctatgcgcctggcgcacaacgcctttactcgaatcccagcattggcctgttcggctacctcagtgcgcaaagcctgggccagccgttcaacgtcgccatggagaaaaccctgctgcccaagctgggcctgaaaaacacccatgtcagcgtgccgccagacaaaaaccagacctacgcccaaggctacgacaaggatcagaaaccggtacgcgtcggccccggcgcgctggacagcgaagcctatggcatcaagaccagcagtcaggacctggcgcagtacgtgatgctgaacatgcacccgcaaaccctggagaaaccgctgcaacaggccatcgccaccacccacaccggttactacacggtgaacggcatgacccagggcctgggctgggagtactacccctacccgatcacgctgcaagcgctgatggaaggcaactccacaccgatggccatggagccgcataaggtgaaatggttgaccccggccccggcccaggtgcaaccggccaacgtgctgtacaacaagaccggttcgacccgtgggtttggcgcctatgtggcctatgtgccgagcaaggacatgggggtggtgattctggccaacaagaactacccgaatgccgaacgggtgaaagtggcccatgcgatcctgagtgcgctggaccactgatgcacacgccctgcaggagccggctggcgggctcctgcaagttgggttacatcccgagccagtgcggcaacgccagcgaaatgaacggcaagtacgtgaccatgatcaggaacaccaacagaatcatcagccacggtagcgccgcgcggatggtctgccccagcgtcaacccggtcaccgccgaggtcacgaacaggttcagccccaccggcgggtgcaccaggccgatttccatgttcaccaccatcacgatccccaggtgaatcgggtcgatacccagcttcatggcaatcgggaagaaaatcggcgccaggatcagcacgatggccgacggttccataaagctgcccgccaccagcagcaccacgttgaccatgatcaggaaaccaatcggcgtcagcccttcggagatcacccatgcggtgatttcctggggaatctgctcggtggtcagtacatgggcgaagagcatcgcattggcgatgatgaacatcagcatgatcgccaggcgcccggattcgagcagcaccttgggacagtcgcgcagcttcatgtccttgtagacgaacaacgccacgaacgccgagtacaccgccgccaccgcggccgcttcggtcggggtgaacatgccgctgtagatgccgccgaggatgatcaccagcagcaacaggccccagaaggcgcggcgcgcgcaggtcagccactcgcggaacgtggcccggggctgggccggcagcttcttgatgcgtgcgacgatgtagatggcgatcatcagcatcaggcccagcaacaggcccggaatcaccccggccatgaacagcttgccgaccgaggtttcagtcgccgccgaatacaccaccatcacgatcgacggcgggatcaggatgccaagcgtgccggcgttgcagatgatccccgccccgaactccttcgggtagccggaacgcaccatgcccgccacggcaatcgaacctaccgccgccacggtcgccggtgacgaaccggacagcgccgcaaacagcatgcacgccaacaccgccgcaatcgccaggccgccacggatatgcccgacacaggcgttggcaaaatcgatcaggcgctgtgccacaccgccggtggtcatgaacgcgccggagagcaggaagaacggaatcgccaggaaggtgtaggcgtcggacgtctcgaacagcttgatcgccagggagctcaccgagtcctggctgaacatcaggatcgacaccgcaccagacaaacccagggaaatcgcgatcggcacgccgaggaacatgaacacgaacaacaacagaaacagacagagcacggccatcagtgacgctcctcatggctgccggccaacttgctggcctcaccggcctcatcagccagccctaacccgacctgacggtgggtaaagatgcggtagaaaatttccaggtagcggataaacaccatggcaaaaccaatgggtacgatgatcacgatgtcaccgacgtcgatgccgtactggtcgaggtcttctgcgccgatatgcgcggtcatcaccgcgctgacccacttgtagctggcgatcatgaacagcccggcataggccaggcagcacaggcaggcaagcatgcccagcaagcgttgcaccgggcgcctggtcagcttgaccagtgcgtccacgccaaggtggccggcggtgcgcacgccgtaggaaataccgaagaaaatcagccagccgaacatggccttggtcagcgccacgctccaggtcatgtcctgggcccaggtcatggtgtggtcgcccagggcgccgaagaaggtgctgctgaaggcccacttgtcagacagggcaaagaacagcgtgtagatgttgttgagcatgacgtagacaaatgtcaccagggtcatggcggccagcaggaaggcgatgaaaccttcctccaggtgctcccagacgcgccttagcgtttgcatggcaaaacctcgcgaaagcaaatgagatgtcagggtgaaaaccggatcgataggtgggagggggcttgcccccgatagcggtgggtcagagacagatgagcaagctgacacaccgcaatcgggggcaagccccctcccacactgggggattactggttggacgcgtccgccgccttgatcaggtccgcgccgatctcaccctcgaacttctgccacaccgggcgcatggcttcgcgccacagctggcgttgctccggggtcagttcgatgatttcgctggtcttggcgtcgacgatcttctgcttggccgactggttcagcgcttcggcctgtttgttcacctcgacggtgacctcgaccatgatctgctccagggtgctgcggatgtccggtggcaggccgttccagaacttggcgttggtgatcaccatgtagtcgatcaggccatggttggactcggtgaagtacttctgcacctcgttgaccttctggctttcatagttcgaccaggtgttctcggtgccgttgacggtaccggtctgcaggccctggtacacctcggcgaagctcatcttgcgcgggttggcgcggatcgccttgaactgctcttccagcacgctggaggcctgtacgcggaacttcaggccacgggcatccttgggttcatgcagcgccttgttggccgacagttgcttgaggccgttgtgccaataggccaggccgaggatgttcttatcctgcatcgaggtcagcagcgccttgccctgggccgcctggaagcggtcaacggcggccaggtcgttgaacaggaacggcaggtcatagatctgcacctgcttggtgtattgctcgaacttggccagggacggcgccagcatctgcacgtcgcccagcagcagcgcttccatttccttgccatcgccgaacagcgacgagttcgggtacacctcgaccttcaccttgcccggcaggcgttcttcggcgagcttcttgaacaacagcgcgccctggcctttgggggtgttttcggccaccacgtgggcgaacttgatcacgatcgggtccgccgcctgggctaggcctgcggcaaacaaggtggcggcgcacagcagcgcccgggagagcttgagcatggaaaatcaccttcttattgttgtgttgtaaggcaaggtgcctgatgtgacgcgtgtagtgaatttcgaattttagatacctgcgttcggcgtggccgaacgctacgcctgggccgccaacaacctttgcgcgcgcagcaacaccggcgcatccaccatctgcccatcgatctggtaggcccctgccccatgggcgccggcgtccaccacccgctgcgcccaagccaggtctgcggcgctcggtgcgagcgctgcatggatcaccgccacctgcttgggatggatacacagcgccccggcaaagcccatttcataggcatgccggatcgaacggcgcaggccttccgggtcatcgatggccgggtgtacaccgtccaacggcgcgaccagacccgccgcccgcgaatgcacaatcagcgccaggcgcgcctggtccagggcgaactgcgcagccgcggagttgctgctcaggttcaggtccagcgccaggtccagcccgccaaacgacaggcgctgcacctgtggcgcatgggcgatctcggccacggccagcaagccacgggcgctttcgataatcggccagatcactttgccggtggcggcaaccaccgccacttgcgcggcactttcaaccttgggtagcaatacccccgccacattcggatgggctttgcagaacgccacatcctcgaaatgctcggcatgctccggcgcattgatgcgcacccacacctgggcagcggggttcgccgtcaggaacaccccgaggttatcccgcgcctggcgcttgagcggttcttcgaccgcgtcctcgaaatccacgatcaccgcatcggccccactggccagggctttggaaaatcgttccggtcggctaccgggtacaaacaacgccgaacgcaccaatggctttggcatcacagaattccttatttagataacgccgcgtgcacgcaggctgtcgatggcatcgccggagtaaccgagccggtcgagaatgccctggctgtgctggcccagcgccggaacgccgtccatgcgcggggtaaacgccgcattgcgggccggcggcaacagcgacggcagcggaccggccgggctatcgacctcgcgccagctgtcacgggccttgagttgcgggtggtcccatacgccctgcatatcgttgacccgggcgctggcgatctgcgcgtcctccaggcgttggatcaccgcctcggcatccaactgcgcaaagctgtcgacgatgatctggcgcagcacctcacggttcgccgagcgtttgaagttggcgctgaaacgctcgtccgtcgccaattcaggcgtgagcagtaccttgtcgcagaacgccgcccattcgcgctcgttctgcaaaccgagcatcaccgtgccgccatcgccggtgggaaacgggccgtagggatagatcgtcgaatgcgcggccccggcacgcggtggctgcggggcgccgtcgaaggcgtaatacatcgggtagcccatccactccaccaggctttccagcatgctcacgtcgatgcggctgcccttgccggtcttgccgcgcagcagcagcgccgagaggatgccgctgtaggcgtacatgcccgccgagatgtcggcgatggagcaaccggccttggccatctggtcgtcgccagggccaccggtcaccgagagaaaaccgccctcgctctggatcagcaggtcgtaggccttctttttctcgtacggcccgccttcgccgtagccggaaatatcgcacacgatcagccgcggaaagtgcgcatgcagcgcctcgaacgacaggcccatgcgcgccgccgcgccaggcgcgaggttctgcaccagcacatcggcgtcggcgagcaaggtgtcgagaatatcgcccgcctcgtcctgcttgaggtccagggtcaggctttccttggagcggttggtccacacgaaatgcgaggccagaccgcgcacgcgttcgtcgtagccacgggcaaagtcgccgacgccggggcgttcgatcttgatcacacgagcgcccaggtccgccaactgacgggtgcagaatggcgcggcaatcgcatgttccaggctgacaacggtgatgccgtccagcggtcttgggttagtcatgacagttcctcagagccagtgggccatggacgtggcgttgcgcaaatcccagaccttgtcgatcagtgcgttggcctgggccggtgtgcgggcgttgctgaattgggcgaggcgctggaatttgtccgccagctccgtgcggctcagggtgttgcccggatcgcccttgggctcgtcgatggcgccgtgcagtgtgcggccatcctgcgtggtgacggtgacacggccgagccagcgttgcgggtaggcgccgtcgacttcgcggtcgaggctcatgctgaccttgtcgcgaaaagccgacacggccgggtcggtcaacgccagctcatggaactcggtgagcccggccttgccgtgtacggcaatcaagcccagcacagtgcccatggagaacttggcctggtgcacgctggccggtacgttcacgcgccccagtacatcgatggcgccctgatgcacgcgggtttccacgcgggcaatatcggcggcggcgagctgttcgcgctgcatcagctccaacagcgcatcggccgcaggatgggtatggcggcacgacgcatgaaacttgaacgaggtctccagcaatgcccagcgactgcccaggccggcggacaacttgcccggctcggcatcactggacatgcccgccgccagcccttggtcgccctcaagaatattgcgtgcaccggtcagcccatccgccgtcaggtaagcggcgagcaacccgtccgctgccgccttggccgtgtgcagctgcttggagtcggcggcatcgcgcaggaactcccacaacccggcggcctgggtgcctgcgctgccgagcaggttgatgaattgttcctggttgaaatccagcaacttgcccaccgccaccgccgccgccagggtgccgacggtggccgtggtgtggaagatgcggtaatgggagcggcccatgaattccccgatgcggatacccgcctcgtaaccggccaccgaggccagcagcaagtcgcgcccggatttgcccaggtcctgggcggcggccaaggcagccggaaataccacggtcgccgggtgcaacacggagctgttgtgcaggtcatcctgctccaccaggtgcgatgaagcgccattgaccaacgcggcgaagtaggcgctgctgctggtgccattgacgatcacctgggccgggccgctgctcggccccatcttccgggcatagcgctcgaacaacggaatcgggtgcgcccctttactcgccagcgccgaggccagccaatccaggtacaggtcttcggtgcgcgcgaggacggtttcgggcaactgtgcgtagtgcagatccgccaggaaccgacataaggcttgggtatggctcatggtcggcccctcagaagctgcgtggcagttcgagcaggtgctcggccacgtaggacaggatcaggttggtggagatcggcgccacctggtacaggcgcgtctcgcggaatttgcgctccacgtcgtactcgcaggcaaagccgaaaccgccgtgggtttgcaggcaggcattggccgcctcccaggacgccttggccgccaggtacttggccatgttggcgctggcgccggcatgcttgccgctgtcgtattcctcgcaggcgcgccagcgcatcaggtctgccgcttcgatctcgatatgcgcctcggcaatcgggaactgcacgccctggttctgcccgatgggccggccaaacaccacgcggtcacgggcatacgcgctggccttctcgataaaccagcggccatcgccgatgcattcggcggcgatcagcgtgcgttcggcattgaggccgtcgaggatgtatttgaaacccttgccctcttcgccgatcaggctgtccaacggcaactccaggttgtcgaagaacagctcgttggtctcgtggttgaccatgttggcgatgggctgcacggtgagcccgttgccgatggcttcgcgcaggtcgacgaggaagatcgacatgccttcggatttcttcttcacctcggccaacggcgtggtgcgcgccagcaggatcatcaggtcggaatgctggacccgcgagatccacaccttctggccgttgatcacgtacttgtcgccgcgcttgattgcggtggtcttgatcttggtggtatcggtgccggtggtcggctcggtcacgcccatcgattgcaggcgcaattcgccgctggccagtttgggcaggtagaagcgtttctgcgcttcgctgccgtgccgcaacagggtgaacatgttgtacatctggccatgcacggtgccggagttgccgccgcagcggttcacttcttcgaggatgaccgaggcctcggccaggcccaggccggaaccgccgtattcctcggggatcatcgccgacagccagccggcgtcggtcagcgccttgacgaaagcctcgggaaagcccttctcttcatcgatcctgcgccagtaggcggcatcaaattcagcgcacaaggcgcgcacgccttcgcggatggcgttgagttcttcgttgtcattcgggttcatctgcggctctccgcctgttgttcttggattattcgaaattcacctgggcttgctgcgccaggccatcgctattgccagcccacagttgggcaacgccggtttcggtgacgcgcccgcccacttcgaagggttgcggcgcaatcaatgggcgcacaccgcgataggcaaaccggcgcaacgtggcgtcgggatgggcgcgacagaacgcacgcaagttcagggtggcgatcagcggcccgtgcaccaccagcccggcatagccttcggtgccggtgacgtaggggtagtcgtagtgaatgcggtggccgttgaaggtcaccgcgctgtagcgaaacagcagggtcgccgtggggtcgacggtttcgcaccactcgccctgctccagcgcctcgccgctgcccgatttgggcggcgtgggttcgcggtagacgatgtcctgttcctcgcggatcgccaggcggcctgcctgggagtagtcgtggcgcacggtgacgaacagcagcgagccagtgcgcccggtcttttcttcgacctgggtgatggtcgacacccgggtcgccgcctcaccggcacgcagtgcatgcaggaactcgatgcgcccaccggcccacatgcgattgcggttgtcggccggcggcaggaagccgccacgggccggatgaccatcaccgcccagagcggtttccggcagtgggtcctggaagaaacaccactgccacagcggcgggatatccgcgccgtcttcgggcacggcttcgccaaaggtggcggcaatacgcttgagcaggttatggctgaggtggtcgtgggcggtttcgctacggccgatccaatcggtggcgctcatcgggtgcaggtcctcgggcagtgagtgtctgccccggatcatgcaagggtgtacccgttccgggaatttgcatttcaataaaccagcgttcggttatgctgaacgccgccatcctgtcccgggagtcttgcatgcacttcgatctggccgacctgcgcctgtttatccacatcgccgaatcccccagcctgacccagggcgccaagcgtgcgttcctctcgccggccgccgccagtgcgcggatcaaggccctcgaaggccaactcgacacgcgcctgctgtaccgcgacagccgtggcgtggagatcaccccggccggagagcgcctgctgcaccatgcacggttgatcatgcgccaggtggattacctgaagagcgaattcacccaatacggcgtggattcggccgggcatatccgcatttttgccaacaccacggcggtcaccgaattcttgccggaggtgctggcgggcttcctgtcccagcgccccggcgtgaccgtcgacctgcaggagcgcctgtcccgcgacatcgtgcgcggcgtactggatggcaccagcgacatgggcatcatcgccggccccgtggaagcctcggggttgcaggtactgcacttcagcacggataaactggtgctgatggtgccggtggggcatgcgctggcggaacaaccctccgtcaccctggaacagaccctcgcctaccagcacatcggcctgcatgaaggcagcaccttgctgagcttcctgcgtgaacacgtcgagcggctgggcaagcagctgtcgctgcgcatccagatgtcgagtttcgaggcaatctgccgcatggtcgaagccggtgtgggcatcggcatcattccggagtccgccgccgtgcgccacagccgtaccatgcggctggtggcggtgaagctggatgaaccctgggcaatccgcgagcgcagcatcctggtgcgggagctggaggcgttacccggcaccattcgtgcgttgatcgccacgttgatgccggactcggtcagtgcaaactgaggttacgcagacgcgcaccgtccacggtgacatggctcaagcgcccctggtcgtcgaataacagccagccgtcctcggtgcgacggatgttcacttcgtaacgaggccagtgcagcaccgcacacaggtggtcactggcgcgatggataaagtgccaacgcgtgtcgcgttcgccggcaatatagccgaacaccaaccactgcgcgtcgagggcaatgcgcaccgggtcgccgtcgaagaaaccttcgtcacagcccggcatgcgataacccttgcggttgccatcgacatccaggatcagcgtcggctcttcgtcatcgcggcacctgatcccgtactcaatggtttgatcgagtgcacagtacagcgcgtggctttcctgcgactgcgtggacgccggctcacgcccggccaaccgacgctcaggcaagcgatagtgccagcgttcgacaccctcgcgcgggttgtagagccagaggaactcattacgttcgttgcctttgagcgcgcgcagcgcccccggcaagtcgctgacatgccacagggtctgaaagttgcgatccacgtccaccacgcgcagttgccggtcctgaccgagggtccaggtgctgccgtcaaactgctcggcgaacacctccagcacctgcacgcccaggtcggtggcggtacggttgaccaggtcgagtttgctgatacgccatacccggtcacgccgggccagcaccagcgccatctgccgactgtgagccaggacaatccgctgggccggcacggcgaagaggaacagtggctggccgctggcatccgtcaccaccgcaccggcctcgcccagcgccaccaggtaacgctcgtcatccagcgacactgcgtcgtatatcggtcggctaccctgggtcggggcggtccactccagcgcatcacccacccctaccaacgagcgtatggcaggccgcttcagggcctggccaggcaagtctgcctgcaacaatttatcgcggctcatcttgaccagcgcttgcagctgattgaagttcagcccgccgcgaccactgagttggtcggcgatcactgcgtgcacggttgcaccggccagccaactcagggcagcggcatcagatttgtgcgccaacagggcgtgcgccagggcgtcacgctcggcgtatcggtcgggagcgtcgcgcaactgttcgatccacggcccgtaagcttccagggtctgcggcagcagaatcgcgcgtttgaccaaggcccccatcgccagccgcccaccggccgcttcggcatccagcaaccattgcgccgcgcgcgtgcgctcatccggcaggctccacaccacctcgacggcttgcagccacaggcccttggcgatcagcgattcggcccactccaggcgcaaacgctcggcaatctgcggctgcctggcctggagcaacaccacggcatcggcaaacgcatcgtcacgccgcgccaccagtaaggcacgctgccagttctcggccaggcacagcagacgcacgatgaccgccgacggcatgtcccaggccagggccaggtcggcagcctgttggtaacgtgcgtgcttttccaggtagtcgagggcttcctggcgctccttgagcagttcggcgaggacaaataccgcttcttcgatccggttttcccgagccaggcgttcgtatgagcggcgatagacctcgcgcaggtgctcggtcaggctttgttcgaagtggtaggcgcggcctggcccgctctgctggctgagggtcaggtcgtcgcgccgctgcggcgtaccgaagttctgttcagcatccggctcctggcctcccagaggaatggcatggcgcaaggcttcggcaaaatcaccgtcctcgaacatctccagcatgcgctgcatgtaggcggcctggcgtttgccgtagagcctggacagttttgaaagctcggtcagacgggtcagccaacggcgccaggcggacggtttaagccgagccggtgtggcccgctcggcgatgcccggatccgccggtgccgaaggcgcggcgccgacgggctgcacgcctcgacgcaggtatttgttgatgcccatcaacaaggcagtgaacaccgttgcgcctagcaacatgcccaggatcacgcggctgatgtcttcagtggtcgaagcaggaatcggtgtcaggggttgggattggctgtgagtgcccatccagatcaacccggcgaccaacgccagggtggcgcccagtttcaacgccgggtactgcgcgggcgcctcactggcccatggctgggccgccttgggaggcgctgctttcggcgctggcggttgacgctccagcaacgcgcggatcacgccttcctgctcgggactgaccggcgccaagccgccaaggatctcacgcacatcggtgatgtccggcacgggcagctgcggcgcaaccggcgcatgacaatcgaaggtatcgagtaaggtgtaggcactgatctccagccacaacccaggctcaaggaccttggcgtcgcgcagctgcaaggcgtgcacctggctggcgcgcaccagccacaagtcggcggtgggtaaagcacgcagctcgtcagcggtcagccgtgccgaacacaacccacgcccctggcggaccagcggccagccgtctaaggtctggcaatcgagtgcgacgggcacgctgaactgcaacacatctccgtcggcaaaacggtaggcggcggcgcccgcgcgccagtgtccgaggatcaggcgagcccgctcctgcgtggtgaagcggtcagcaggcaaccacacaccgtcgatggactggtggccggtcagcagcggtcggcggatcagcaggggttcgtgctcatgcatgggcaggctcttgtttcaggtcgcacatgacttgcaaacgcatggcgcgctcggtgacgttgaacaccagtagttcccgggcggtggtcagcaccgccaccagcccgctcatggggcagaagctggcacgggcaatcggtgcggaggtggtgaacagcgtctgttgcagaccttccgagtacaggccgacggtgtgctggttcgggcccagcagtaccaatgcatagcactcctgcgcggccacatggtgatgcaggccgatagcactccagcccggcgccaagtcgatctgcgcccttttcgcggggaagctgtcgtgggtcaccaggcgccaactctggcggccatcatggtgagtgagtaatgcgcacccgccaaaggtgtacttccagtgggaggtgctggcgaacagtacctggctgaccccggccgctgcaccgaccgcatagccggaactgcggacaccagaggccgttgcggggtacgccaccagttgcccggcctcgctgcgggcgtagaccaacgacaaggcatccagctgcgccaagcctatgacattgttggttaccgagaaaaacgcgcccctcggtccatgaccgggacgctgccagtgggcgagctgaccatttgtatcaagcacatacaggcgttccgcttgttggccgcgcagccacaccgcgggcagcaaggtcgcggtgcccggtggcaggtgcagctcttcgcgtgcaggtttgttggcggaaacaaggccggggatattccagaaggtcaggatgtggccatcaccgagcaccgcaccgaggctgcgataattaaacgcggcggcaaacacatgctggtgtttgccccacaggcgacggcgtacctccagggcttttttctggtttttgtgcggcagcttgatcaccaccatgccgtgttcgtcgagcaggcgcagggcgacatagttgccggagccggagatgaccggtggcaatgtcaaagccacccgcgccacccgcccggtggcggtgggcggcggggtatgcgcggcgttatcgaactggcccttgagcaggcgcaccgcctgttgctcgtcgggcatgggcagcgacacgcgtcgtgactgcaaggcaaaagacagactgcgtccgtccaggttgcgcgcaatctgcacgcggtgggtgcaggtcttggaatcggtaggcggcaagcgctggccgaccacccagcactctcccacccgatgttcggccaaggcgtcacgccaagccagccaatgggtgtcgctcaccacctcgtaggtgcgggcctcgagcaagcgcttgagttgcgccgccgagtccagctcatgcaacaccggcgtgccctgcagaatgccccagcgcaattgcgcccccgcctcctcggctcgccgcgccagcaatatcagcagcgccaggtgtaccaggcgcgcgacgcccaattgcaggggtccggcgtcgaacaacaccacgatcagacggttcgccgcctgggcgcggtactgtggcgcgaggaacatatgctcgccgccgaccgcccggcgcaggaactcatcgggtacttcatcggccagcagccattcgctggagagcagccgctcataggcaccgcgccggtgcaggtcgcccaggccgtcgggctccggcacaccgccctggtgcaggcctcgcagcggtcccaacagcgggttgaggcggcccagcaggtcggcgaacacgggtaactgttccggggcaaaccattccagccagtgccgccagggttgcagcgactcaggcagttgcatgagtgactccccaataatcagcgatacgttgcacaagggcaggcgaaacggccagcaagcggtccaacgggaccacggccgcaggctcatgccacaccagcaggggcgaacgcttgaagcgtgcggaaaaggcctggcccagcaggtcttggggcacatccggctcccagctggtcggcaaccagaggtgtggcgcgctcgcgctgggagccgcgtaagccacgccgtcgacccacggcagatcagccgtcgagccggtcaccaccagcacctcaccgttggccgtggcgtgcagacgcgcggcgtgttcaggctcaagcagcgccaggcgcctgagcatccggcgtgccgcatcaccccaggccacggcggcttgcgcctcgacgggtgcctggcgtgagcgccagcgccaaggatgggtcaacgcactcattcggcaggtatcagcaaacgtgtaagttgcccccgcgcctgctgcaacggctcgggcatcgtctggctgttgaagttcgcatcaatctcgcgcaacaacccttcgagcgccgtactggtcggcggttcgctacgggcgagatagtcttcggcggtttccagcaggcgattcagacgtgacatcggctgcaacgtagcctcttccacggcgctgaacagatggctgttgctggacgcggcaaacaggtcgcgcaacacctcacgcccctgttgttgggtggcctgggtcggcaacacgtacagcagcggccacaggtcagcgtcgctggcttcgaggcggccgctgagcaacgcggcggcggcgatcaggcgttgggatttgacgatgcgtcggtcagacaactggatgccggcttcacgcagacgacgaaccgcctgggccagggcgggacgcacggcggccaggtcgacgtttttcaacgcatggccaagcgtgtccagttgcgtgaggcccagcaactgctgcaccgggcgttgctccgactgccagccaccggccagcatggcctccaattggttgtccggcaccgactcgacaaacaggtgcaacaggaaacgatcaccaaaggccgccagcgcttcatcatccggcaggccgttggccgcgccgacgcacacccgcagcgggcattgcacctgggtgtggccacggcggaaacgccgctcgttgagtacgccgagcaaggtattgaggatcgcggtggagcccaggaagacttcgtcgagaaacacgatgtcggcttccggcagcatgccgctgacatcggtttccaccgtgccttcgcgcagctttttcaggtcgaccgcgccaaacagttcggacggttcggtgaagcgcccgagcaggtactcgaaatagcgcccgcccatcgactgcgcaacgcgccgcaccacggcgctcttggcggtgccgggcggcccgatcaccaggatatgttcctgggccaccgccgccagcacgatcagttcggccaattgctcgcgccccaccaagccctcggttgcggcacgtacagcatggcggatttgcgcggcagcgctttgcaactgagcaatcatgggcgtcttccctgaaaccaaagcgctgaatcttgcctgaggctaaggtattagcaaagcgttgttacataccctgatcaggagtcagcccatgcagctcgaaggatcctgccattgcggcgccgtcacattcagcctcaccagcgcccacccctacccttaccagcgttgctactgctcgatctgtcgcaagacccagggcggcggtggctacgcgatcaacctggccggtgacaccgcgagcctgaaggtgcgcgggcgcaaagccatttcgatctaccacgccaggctcaagcccgaaggcgccagccgcgcccatgcgagtagcgccgagcggcatttctgctcgcaatgcggcagcgcgctgtgggtgttcagcccggaatggccggagctgatccacccgtttgcctcggccatcgacacactgttgccggtaccgccggaccatacgcacttgatgctggcgtcgaaggcgccgtgggtggagctcacagtgcgcaagggtgacctgcagtttgacgagtacccgcaggagtccattgcgcagtggcatgagcggcatgggctggcgcgttaatcaccacagaatttttttgccataaaaaaaacaagcctcaggtggacaagcgaaattgacagattgtagattggatacagttgacaatctaaaagcagtcccaccacaacaaaaaaggtacttgaaatggcaatctggaaaggcgttttccccgcagtcaccaccaagctgaccgaggatggcgaggtcgatttggcggcaacccaagccagcattgatcgactgatcaataatggggtttcaggcgttgttgtcctgcctatgctgggcgagaacgcgtcaatgagcatgcaggagcgcgaatcagtcattcgcgcggcggtcgaggtcgccgacgggcgtgtgccggtgctgtgcggcctggccgaaatcaccctgcaaacggccaggaagcatgcggcgctgtacaagcgttttggcgcccaaggactgatggtgtttccaagccttggctacaagaccgatcatcgcgagacggtggaatggtacaagggcatcgccagcgcaaccgacttgccgatcatgatctacaacaacccgatcgcctatggcgtggactgcaccccggcgatcctggccgacctggtggacacacccgagatcgtctgcgtcaaggaagaaaccggcgacatccggcgcgtgaccgacatgtacgtggccttcggcgatcgcttcagcatcttttgcggggtcgacgacctgatcgtcgaaagcagcgcactgggcgtcaccggctgggtgtcgggcatgaccaacgtgtggccggcagaatgcgtcaagctcttcaatctctgcgcccagcaacgcttcagcgaagcccgcgagctgtaccacatcctcaccccgtcctttcacctggatgtacacgtcaagctggtgcagtacatcaagctggccgagcacctggtctacggcgcgccggaatggacgcgcgcaccacgcctggcccttgtaggcgaggagcgcgaatacgtgatcagcaccgtccagaaagcgatcgatagcctcgccgttcgcggctgacgcaacgggccctttcgcctcgtcaaggggcccgctccgtcaaccatcatccaaccccttcacagccatttttcattgagcgagtcccgttatgtccattacaggtgagatgctgatcggtcagtcgaaggttcgcggtaaaaacggtcagatgtggggattcaacgccgccaccggtgagcccctttccccagccttcggcggtgccacgctggacgacctcgacagcgcttgcgcactggcaaatgcggctttcgatgcttaccgcgaaacgacgccagggcatcgtgcggttttcctggaaaccattgcgcgcaatctcctcgcgctgggtgatgccttgatcgaacgttgcatggccgaaacaggtctgccgcgcgggcgccttgagggcgaacggacccgtacggtcaaccagttggcgctgttcgcctccgttgtccgcgacggcagtttcctggaggctcgcgttgatcctgcatgccctgaacgcataccactgccacgcgcagacatccggctgcgcaacattgcccttggcccggtggccgtgttcggcgcgtccaattttccactggcgttttctgtcgcggggggcgataccgcctctgcactggccgccggctgcccagtgatcgtcaaggcgcactcggcgcatccaggtacatccgagctggtgggccaggcgattcagcgttcaatacgtgcatgcaatttaccggagggcgttttctccctggtattcgatacgcagcacagcatcagccaggccctggttgccgatcaccggatcaaggcggtgggcttcacgggttcgcaacgagcaggcatagccttgatgaatattgcagcggcgcgcccggagccgataccggtctacgccgaaatgagcgcgatcaacccagtggtgttgctgccccatgcgctggccgaacgcagtgcggcgatcgctgacaccttcgtcgcttcgctcatcctgggcgcaggccagttctgtacgaaccctggattgatcctggcgatcgagggcccgtcactcgcagcctttgagcacgcggcaatcaccgccctgagcgccgcacctgcgacaaccatgctgacgcgtctgatctatgacaattattgcgatggtgtcgaaaaactgcgtgcgcagtctggcgtagaactgcttggacgaggacgacaaggtgaaagcttccaagggcaggccgcgctgttcgccaccagcgcgcatgcgttcctgaaaaatacagaactgcgtgacgaggtctttggcgcctcatcgttgatcgttcgatgccccgatgcctccagcctgctgcaggtacttgaagcgctgggaggtcaattgacgatttccgttcacgccagcaccaacgactaccccgcactcgccgcgctgctgcccacactggagaaaaaggccggacgtattctgctgaacggtttcggcacaggcgtggaagtctgtcatgccatggttcatggtggccccttcccggcgacttccgaccctcgctccacttcagtaggcagcctggcgatcaatcgattcctgcgccccgtgtgttaccaggacttcccccaggctttgctacccccggcactccaggacagcaacccattagggctcagccgaaggatagatggcacagtgaaaccttgacatgtttcgcgctcatttactggaagcgtcctacactcgtgagcctgaggtatgatcgaccgatggggatctcaaatcctggatccattcacctgtcagtagttgaagaatgccgaagaaagagcctttacccaacctgcgcatcaaacgtcaaagcttgcctgaaaccctggcggaatcactgcgtgagcggatcctgaatggggaattcaaggaaggcgagtcgctgatccaagagaccattgcgaccgagtacggtgtgagccgcatgccggtgcgtgaagcattcaaggagctggaggcgtccgggctgatcacgacgcagattcacaaaggctccgtggtgaagtccattccccttgagcaaatcgcggagttgtttgacctgcgtgcgctattggaatccgagctattggaacgctccctgccgaaaatgaccgacgcacactttgcggccaccaaacaattgctgccgcaacttgaagccgcctacctcgacgatgacatcgcgcaatggggcaagctcaactggctgtttcatcaaagcctgtatgcagcggctgatcgtgtgcaaacgctggctatcgttcaaggcatcaacgttcagacggatcgatacatccgcctgcaactgttgctgaccgcggggaaaaaagaagccgaagtcgaccaccgcgagctactccacctgtgcgaaaaacgtgatgtcaagaaagcggttcagttcctgcgcaagcacattcagcgtgcaggttctgacctggtcacactgctcaagaaaaaacgcgataaagaaacccaggcttgaatgccagtggcgcccctccttggcggaggggcttgtccacttggctcaattgagttgaaacccatgcgccagcggatcgcgctcatccacaagaatagtgttgtgccccgtgacctgagcccaaccagcaatgctcggcatgatgcccgggaaagcacctacctccgtcgccgactcgacccgacaatcaaacagtgtgccgatgatgctctcgtggacaaacgtatcgcccaccttcaagcggcttcgggcgaccagttgtgccatgcgcgcagaagaacctgtgccacacggtgaacgatcaatggccttgtcaccgtaaaacactgcgttgcgcgcgtgcgcgcgtgggttcctgggtttgtcacaccacatcacatggctgatgccctggatacgactgtcttgcggatgcaccggcgccagcagcgcctgcgcggccttacgaaccagaggactcaaccgaataatttcactgacgtccattgaatccaggccatcccaaccggcttgcggctcgatgatgacgtagaaatttcctccatacgccaggtctatgttcaatttgcccagggtgggtacatcaagcgccacattagctgcgtggagataactcgcaacgttgtacaggcgaacctgctccactctcgtaccgtttttcacgtagtcgatcgcaacgcgcccggccggcgcctcgatggccaacgaaccctcgatcctcggcaccaccagaccggcttccagcgccgcagtcaccgttccgatggtgccgtgaccgcacattggcaggcagccactgacctcaatgaacaacacgccgatgtcgcaatcctcacgtgacgacggatacaagatgctgcctgacatcccatcatgaccacgcggttcgaacatcaacgcttgtcgcacccaatcatgctcgcgctggaaaatctgacgcttttcagccattgaaacattgggcagcaaaggcccccccgcggtgacgatgcgcaccggattgccacaggtatgcgcatcgatgcaaaagaacgtatgacgagacataggaactcccttttgaacgcgttagttgaaacggctgattgcatagggttcaaggtcgaccaaagagggtttgcccagagcaatatcgctgaccaagcgaccggttgtggccgcctgggtaagcccgagatgaccatggccaaaggcgtatatcaccgagggatggcgcgctgaggcgccgatcaccggcaggctgtcaggggtcgcagggcgatgcccggcccaacgggtaccgccctccgtacgcaacccgggcagatagagcgcggccagcctggccaaggcctgggagcgcttgaaattcgccggtgcattcaacccgccgaactccgcggcgccaccgaccctcaaaccacagctcaacggcgtggccacgaagtggcgctccgcgaagatcacctccctggacaagacgacacccggttcgggaagggtggtgttgtagcctcgctcgctttccagcaagaccttgtcgccaaggcgctgggcgagtaggcctgaccacgcaccggcggcgaccacgaccttatcggccgttaaccaccggccatcgacgagccccaccgacacagcgctaccctcaaggcccggccggataccacaggcctcggcgacctgaatgcaaagccccctggcaagcaatgactgacgcaacttatcaaccagggtcttggggtccctgacgtgtgaccactggggtgtgaacaccccgcgcgtgattgtccgacccagtgcaggctcgatttcacgtgcttcgttgccggtcaacgtgcgcacctcaacaccccacgctcgtttgaggccccactgcattgcgtccttgtcaaacgccgcttctttctcgtagaccgtcagggcgccgagttgtagcagctcttcgcgaagattgtgttccgcgagcagcggcagcaggtcgtcgtagacccgagcgttaagtgccgccaacgccgccgatatgcgcttgaactccgagggcctgccggcacgggagaaacgcagcagccacggtatcaacctgggcgcgtgccccggacgtatcgccaggggtcccaacgggtccgccagccatccgggcactttccacaacacgcccggcaccgcagctggaatcacttccgtgaccgcgatgcctccggcattgccgaacgatgctttgtcaccttcagggtcgcggtcaaccagggtgacgcggactcccgcccccagcagatgatgcgccgttgccagccccacaatgccggcgccaatgacgattacgtgcctcatgaatcgcacccttttcagatggaaaaaatgcacctttttgaaagcaatcatgcccgatctgatcgaccagaacgagcgcatgtagattggatacaataaacacaatctgtcaaccgtcgctgctgcgtctgccaaaccctgacacacttcatagtcagcaacatcttttttattagacacaaccaattgttttttaaggtttatttagaatttataggctgtttttttgaccttcaatgcaaaaaaccctgtttccccctctacttccgcgaataaacatttggtagatttttcgacagatgtagattggatacaacgcataccaacgccacacccctaaaaaatacaatgccaatcagatcggggatttccatgaacattgcacgtcacgcaagcacctctctcctgctcgtcctcgccacaaccgcttccatgaactcagccggcgccggttccaccctggaccaggtcatttcatcaaaaaccctacgatgcggtgtgcaactcgactacccgccggcgggttttcgcaaccaggccaatgagccggagggatacgacgttcagtactgcaaggacatggccaaggcccttggggcaaaggccgtgattgtcgagacaccttcctccgaacgtattcccgcactggtgtccaatcgcatcgacgtgctgattgcttccacctcgatctcaccccagcgcgccatgagcgtgaatttttcccagccctacgtgaactacaccaacgttgtactcacccgcaaagacgccaacatcgaacgtttcgaggacctgaaaggccgcaacatcggtggtgtcacaggcaccacgaccgagcaggaactgcaggcgctacgcaaaggctgggatgacccgaacggcagctatacggggttcggcagcgaagccgaaggttacctggcactggcccagggcaagatagacggcgtgatcatcgggaatgcatcggcggccgcactggttcagagcggtcaatttcccacgctcacgatcaagggagtagcacctacgcctcccgacctgtgcggcatcgccgtcaaaaagtcagacccgcagatgctcaattgggtgaagaccttcgtatggacccaagtcaagaacggtcgctaccaagaactgtatgcgcagtacttcggtgacggcgaggcgcctttgctgacagttgccggcgtggactactaacctcaccttccgagcggccggccgcggccgctcctgcctggagcctgcgctatgttcgggtacacgttttattggtcaatggtctgggagaagctccccgagctgatcgagggggcaaaaacgacgctggtgctgaccgtactttcaatgatcatcggcacgctgatcgcccttgcgctgaccctgttacgtcaacaggaaaaaggccttggatacgctgtcgcaacgtcctggatcgaagtcgctcgcaatacaccagcgctgttccaggtgtacatgatctattttggccttggcgcactggggctgcatttctccagctacctggcgatgctgttcgccctgtctttcaacaacgccggctacctcgccgagatttttcgtggcgggttgcaggctattccacgacaacaacaccgcgcagccaggtcgttgggtatttcatcattcgctgcctacacccatgtggtctttccgcagctgttcaggattgtctatttcccttacgtcaaccaactcaactgggccctgctcaacagctcgctgggcatgatcatcggcctgcgcgaactcacgggcgccacgcaggcggcccagtccgaatccttcaggacgtttgagtttttcatcatcgccgccgtgatctacttcgtcatgtccaagcttatcgagggcggcgcccgactcactttctggcgcgtgttcaaggggtaggcaatcatgcaattccaattggcttactcaggtttgcactggggcgatcttccgtttgtgctcaccggtatgtggcacaccttgttactgacgctgctggccaccttttttggcagcctgctcggcgtgatgatcggttggcttcgacaagaatcagtgttcgcacgtctcgcactcggaccgttcgtcaacgtcatccgcagcattccgctgatcatccagttcatcctggtcaacagcctgtttgccatggccggcttcgggatgagcccactgtttatcggggttgtcgtcctcagcctgtacatgggcatgctgacctcggaactggtccgcgcgggtttgcaatccgtgcgcccgcaactgaaaaaagccagccggtcactcgggctgagctattggcaggagctgcgccacctatccgccccgcttgcctttcgcacactgcttcccggctggattggcacagtgataggcctgacaaaagatacagccctcgtgagcgtagtgggctacatcgagctgctgagagcttcacagatcctgatcaaccgctcgaacgaagcactcctggtgctcgcgggcgcaggtctcttctactttgcgatctgctacccgatctcccgctacagccgccatctcgaaaaggtaatgcaccatgattgatatcaaggatgtccgcaaaagcttcggcgctgtcgaagtcatcaagggcgtcaacctgaccatccagaagagtgaagtgttgtgcctgatcggcgccagcgggtcggggaagtccaccttgctccagtgcatcaatggcctggagccgattcaaggaggtagcatcatggtcgacggcacggatgtgcacgccaggggaaccgacctgaacaagttgcgccagaagctcggcatcgtgttccagcaatacaacgcattcccccacctcaccgccctggagaacgtggcgctggcgccgcgcctggtcaagaagcttcccaacgcccaggctctgcaactggctcgtgaccacctggctttcgtcggcctcgacaatcgcgcagacatgcgccctgccagcctgtctggaggccagcagcaacgactggcgatagcgcgcgccctggccatgcagcctgactacatgctattcgacgaggtcacctccgccctcgaccctgaactcgtgggagaggtgctggatactatccgcaaactcaaggactcaggcatgaccctcatcatggtgacccatgacattgccttcgctcgcgagtgcgcagaccgaattgcattcttcgataacgggttgatctgtgaagtcggtgacgctcgccaggtaatcaatgagccacaggaagaaaggacacggcagttcctccaacgcgtattgcactgacgtgacatgagccacacaccttggcgcgttaacagtctttgacagtttctcgacaaagctgtcaaagacccccgggcgccacgcccctagcatttgagcatccaaaccacctgccgggtgctcatcatgcttcgcacgttgcgcggtattccattgctcggttgcctgttgggcagcatcggctgccaggggcaagcctctaccccgccgccgatccccaagggcgactacagcgcgatcatccgctacctgcaaacccgcatcccccgggatatggcccaggccaatgtgcccggtttgtcgattgcactggtcaacgggcaggagttgatctgggcgcgcgggttcggcatggccgacaaaaccctgggcgtgcccgtgacgccgaacacggcgtttcgcgctggtgcgatttccaagctgctcaccgccagcgccgccctgcaactggttgaacagcagcggctggcgctggacgcaccgatccaacagacgttgcgcgagttctatgtgcgttcgcgtttccacaccgaccagcaggccgccgaccgcgacatcaccttgcgtcgcctgctcagtcatcaatccggcctgcccagcgagcacctgcgcgacctgcgcaacagctatgccatggggcagatgccgatgcgcctgtccggcgtctggctgagcacaccgcccggcacccaagtggcctattccaacctgggttatgcgctggtcggcgcggcgatcgaacgcagcagcggcagagagttcgaggctcaattgcaacacagcctgctcaagccgctggagatgaaccaggcgagttttatcggcaccgcagtacaggcgggttatcgcgcccagggctatcagggtggtatcgccagcactgacgcgcaagtgcgtgacctggcggccggcggtttgtgggccagccccaaggacctcagccattacgtacagatgttgttcgccgagggcctgtacaagggcaaccgggtgatgaaccagcggtccatcgatgacatgttcacccagcaaaacaccggcaacgccctggacttcgattgccggatcggcctggcctggtttctcgcgccgtgcggtgacgagccggtcgggcctggcgtgcgcacctaccagcacagcggtggcggcgatgattttgccgcgcagttgaccctgctgccggaccagcaactggcggtgatcatcatggccaatgacagcaacgccgaagacctggtcgccaacctggccaccgacaccctgcgcctgatgctccaggcgcagaccggcgagccggtgtgcagcgacgagtgccaggcgccccgtcacgggctcaagctgcgccaggtgccggccgccatcgaccgccagcgcctgtccggcttttacgccaccgcctggggcgtgttccgcatccgggacgacgccggtcggctacgcggcgaactggccggctacgacttcgagctgctgcgtgacgaccacggctggctgcgcgcgcaaaagaaagtcctcgggttctggctcaaggacctcggcgaactcggccgcgtacagctcgacgtgatcactgtgcagggccgacagatgctcaccgcgcgcagccacggccagcgcatcgccatcggcgaacgcatcgacccgccgcccttgcccatggcgtgggccgacaccgtcggcacctatcaagtgctcaacacccatgaacccgacgcgccgttgagcggcatcagcgtgcgcctggaagacggcttcctggtgattcgcggccaactgcacgacgagcctttgaccgattacatcctgctgccggtggacaacgcccacgccgtactcgccggcaacggttatggcctgggcgacaccgtcagccgccaggtcaacggccttagcgcctcgggatactccttcaaacgtacccatccacccttgagtttctgaccgacatgaaaaccctgatgagccccaaaaacctctgcctgtccctcacctcgctgtgtttgctggcaagcgccgacgcagtgctggccgaggactggacctacacgctcaaagccggcgtggccaacctgccccgctacagcggcagcgatgagcgcatgactgcgccggtgttcggcggcgccatcgtcagcccctgggggattttcctcgacaccgacaaaggcctgggctggggctacgaaggcaatgccttgagtttcagtgcgtatgtcggcgccagtgcatcgcgcaaggacaaaaacgaatccatgcacttgggctccaagcgccttaagggcatgggcgaaatcaagtcacgcccgcagctgggcgtgagcgcccactacaatctcggcggcgccattgtcggcgcgaccctggagcacgcgctcaaggaagatgaccacaaggacagcggcaaggcctttacgcatttggagctgagcctgggcaccacgctgtacgaaggccgttatggctccgtcgatgccaacatcaacagccactttggcgaccgtgactatatgcagacctggtacggcgtcaccaccggccaggccgcacgcagccgcttcaaggcctacaaggccggtgccggcaatatcagcaatggcctgaacctggtctggagcctgccgatcagcgagcacaccgagttctcgaccttgctggatgtgcagtacctggcggatgaagcgggcaagagcccgattgtggagcgacgcttgcagacgtcggtgatgggcgtgctggaatacacgttctgattggataggtgggagggggcaagccccctcccacacttgatctccattgaatgtaaaagcgctattcggcgtaggcccaggtcatccggaacgacgcgccgccccattccgaatcctgcacctgcacctggccaccgtgccactgcgacacccgctgcaccagcgccaggcccaggccgaagccaccggtgcggcggtcacggctggcatccaggcgcatgaagggttggaagatcttcgaacggccttcctccggcacgccagggccgtcatcacacacccgcacttcatacccgctgccgaacttgaccaacgacacttccacacggcgctcggcataccgaatggcattgcgcagcaggttgatcaccgcacgcgccataaagcgcggctcgatctggatatagtccacttcgcaggtgcgcaacgacaactggatgcccgcggcttcggcctccagcgccacgctgccgatcacactgtcgagccagctgtgggcctcgatgcgctcgcgggtgacctgggtggcgccgcgctccaggctggcgtaggtgagcagttcggagaccatttcttccagctcgcccaggtcggcatacatgtcggcgatcagttcgccacgcagacgcgggtcggcttgttgcttgagctggtcgagctcgaacgacaggcgtgcaatcggcgtgcgcagctcgtgcgacaccgcattggtcagttcgcgctggttggcgatcaggctttcgatgcgctcggccatctggttgaagtgccccgccagttcgcgcacggtggaacggcgcggcagcaggatgcgagaactgaggtcgttgtcaccaaagcgttgtgcggccaggcgaatatgctcgaggtcgcgccagtgcgggcgtacccagaaatacagcacgatcgccaggcacaccccgaggaaaccataggcccacaggtagagccacttgggttcttccggcagcttgatttccagcagttgcgggccgccgtcaatactggtgagaaactccatgaaatcaccgcgcaccaccagcaaacccgcagccagcagttgcgtctcgcgctcggtgagtgcctgggtgtccttctggaccaacttcaagtgcagcccgtaatggggttgcagctcagccagccgggccgggcgttcgtcggccctgagcggacgcagttgctccaccagggcatacgccgggccgcgcaaggcttcgcggttataggtttcgttggcttcgggcaacagctcgtcgaaggtgtagttgaccagccagatcgcccccgccagaccgagcgccaggatcacatacaggcgcagaaacagccgcagcatttaagcctcccacgcgaacggattgaacaggtagcccttgccccagatggtcttgatacacaccggttcacgggggttgtcgttgagcttgctgcgcagtttgctgatgtacacgtcgacgctgcggttgaggccgtcgaacgcgataccgcgcatgcggttgaggatgtcatcgcgggacaggatcgtgcccgagttgctggccagcagccacagcagctcgaactccatggtggtcagatcgatcttgtcgtcgcccaggctgacgccccggcaactgcgatcaatggccaaccgcccgaatgccagggcaccgcgcacggtcggctccggggcctggcgtcgttgcagcgcacgcaggcgcgccagcagcacaggcggcttgatcggcttgatcacatagtcgtcggcgccggactccaggcccaggatgtggtcaaggtcatcttccttggccgtgaggatcacaatcggcgtgtcggacacggcgcggatcccgcggcacacatgcaggccactctggccaggcagcatcaggtcgagcacgacgatcttcggcttgaactccaggaacgcagccagggcctcgtcgccccggtgctccacacgcacctcgaagccatgctgcgccaggaagtgcgcaatcagccccgcgagtttttcgtcgtcttcaacgagcaagaccttgcccagccccaggttttccataagttctcagtgtgcagacgcggattgaagagctggcattataggtggcaagctgcgcaactaaagcaactgcgcagcggctgccgacgaagcttcatgcttttaagagtttttaacaaataccccgcactctttaacgccgtccacagggagttgtatgcgcaaggattacctggcgttctttgtttcgctgttcctgtcgcggctggcggaccagatcctgctgttcatcgtgcccctgatcgtattccagaccacccagagtgtagcctgggccgggctggcattcttcgtcgagtcgctgccgcgttacctggcgttcccggtgtgcggcgccttgtgcgacaagttcacgccggtgcgcctgctgcagatcagccaggtataccgggcgctggcgtgcgtgctcgcggtggtgttgtatggggtgttcgatggcctttactggattgtcctgctctcggcgctgtgcggggtgctcacgacccagggcatcatggcgcgggaagtgctgatgccgcatatcttcgcgcactacagctacgccaagaccctctcctactcgcagatcgccgaccagagcgggctggtgctggggccgctggtggcggcgctgatgctggaagtctgggcctggcattgggtggtactggccgtggccggattgtttgtgctggccgacctggcgatgcgcgtgtggcaacgctccagcacggcgcacctggaaaccttcgaacagcatcaggacatctggctgcgaccgctaaagattgcgttcgggcatatccgcaacctgccggacttgaaacggatcatcaccctggccgtgggggtgaacctgatcattggcgtcaccctggccacgtcggcggcgatggtcaccggccagtttgcggcgggcaaggacgcctatgccttgctgcaggcagcgggcgcattagtgaccatcggaattttgttttacctggcccgggccggactgccgttgaaggtactgggcggcttgtcctattcgatgatcggcgtgggggcgttgatcatggccgcaagcccaggcgtgtggctgtacgccgtgggtttcctgctggtgaccggcttcgacaagatgttcaacgtctacctgcgcagcacccgccagcgggtgatccccgtgcaggacttcggcaagaccgtgggcgtgatcaccctactcaacaacctgccgcaacccttggccggcctggcagtggcggtgctggcggcgccgctggggacgcagacggtgatcctgctgctgaccgggatcgccgcgttgctcggtgtggccgtggcctcaggctggcacgccactgtgaaagcggaactcgatgtcgggtgactcgatcagttcctgctcggtcgccctcacccgctcgatcacctgggcgacgtccttggcgtcgccgtattggtacgccagcttcaggtaaccctggaagtgccgcgcctcgcttttcagcaggccgaagtaaaacttgccgagttcctcgtccaaatgcggcaccagggcttcgaaacgctcgcaactgcgcgcttcgataaaggcgccaaccaccaaggtatccaccagtttcacgggttcatggctgcgcaccactttgcgcaaaccggaggcgtaacgcccggcatgcagttggcgcagctcgatcttgcgcttcttcatcaggcgcatgacctgctcgtggtgcaccagctcctcgcgggccaggcgcgacatcatgttgatcaggtcgacatggccgtagtacttggcaatcaggctcagggcggtgctggcggctttgaattcgcagttcttgtggtcgatcagcagggtttcctgatcggccagcgcggcctggacccaggcatcaggggtgcggcaaccgaggaattcgtggatttctggcaggttcatcgggctcacgggcaaaaggatcacaaaaggccggcgattataccgaccccgccgcagaccaccagccaccggccttgatgtgcatcaacatgacgtgcgcacgccagcaactatagttgttccaggcccccgtcctttttatggagatcccgatcatgcaagccatccgcagcatcctggtgatcatcgaacccgagcattcggaaagcctggccctcaagcgtgccaagctgattgccggggtcaccgatgcgcacctgcacttgctggtgtgcgacaagaagcatgagcactcggcgctgctggccctgctcaaggcgggtttgaaggaggacggctacagcgtcagcaccgaacaggcgtggaatgccagcctgcatgaaaccatcatcgacgtgcagcaggccgagggctgcggattggtgatcaagcagcacttcccggacaacccgctgaaaaaagccctgctgacgccggcggactggaagctgctgcgctattgcccgagtgcggtattgctggtcaagacgtccacaccctggacgggcgcaaagatcctggcggcgatcgacgtcggcaataccgatggcgaacaccgttcgctgcacaattcgatcattgaccatggctttgatatcgccaacctggccaaggcgcagttgcatgtgatcagcgcgcatccttcgccgatgctgtcggcggcggacccgacgttccagctcaaggaaaccatcgaggcgcggtatcgcgagcaatgcagggcgttccaggcggagttcgatgtggatgacaaacacctgcatattgaagaaggccctgccgatgtactgatcccctaccttgcccacaaactgtcggcggcggtcacgatcatcggcaccgtagggcgcaccgggatttccggggcgctgatcggtaacaccgcagaggtggtgctggacgccctggaaagtgacgtactggtgctgaaacctgacgaagtgatggatcgcctcgtggagcaggccaacaaggcctgatgccgacctttcaaacaatgaagataaaaaatgtgggagggggcttgcccccgatgagggtgtgtcagtggataaatcccaggctgacacactgccatcgggggcaagccccctcccacaggggttatccgttgtcagttggaaaacacatcgcgcagaaaccccggcgcgatatagcgctggtaatgcgcctcggacaggataaagaactcccgatcaatcgcatcgcgcaggtccggcaacggccagtcgcgaaactccggcaatagcaccatgccataggcctccaggttggagatcacccgcgccccccgggcgatcaactggtaggcccagcagtactcggactggtgcggcacgaagcggatcttgcgctgttccaactggccgcgcagggtcttggggtcgaaaacctccagtttgccggccattacctgcaccaacagctgctccaggcgtagccagaccgcacgtttttcttcttcgttatagcaattccactggatcacttcgtggtggaagcgcttgcagccccggcacaccagatcgccgtaaaccgtggagcacaggccgacgcagggggtcttgatggtttggttggacatgggtaacggcacgcagatcagcaaaacaatgcgccatgttagccctttgtctaagctcgatcacccagcaaacttggtcaggcaacttacctttagaaattttttgccgtagaatcatccggccttgtaaggcgccaataatccgctggaagctgttttcaaagcgtcacgagcacagtcgttccttcagaacggtgttggcgcgggtcatgactcggtaggtcagagccctcgccaaccctcatcagctccgttctgcaggcgtaaaactttgaaagcagcttctgtgaggaatgccggcagcgctggctttgcggcccaaaaagcccccgagcgcatgcgtgccgttcatttctggatgagcgtcccgtgggaccactgatgagggtaataactgtgcttgaagcctaccgcaaacatatcgaagagcgtgcagccctgggtattgttccccagccgcttaacgccgaacaaaccgcaggcctggtcgagctgctgaaaaatcccccggctggcgaagaagaattcctcgttgacctgatcaccaaccgcatcccaccaggcgttgacgaagctgcctacgtcaaggccggtttcctgtctgccctggccaagggcgaagccacttcccccctgatcgacaagaaacgcgccgttgaactgcttggcaccatgcaaggcggctacaacatcgtgaccctggtcgagctgctggacgacgccacactggctcccgtcgccgccgcccaactcaagcacaccctgctgatgttcgatgcgttccacgacgtggccgaaaaagcccgtaacggcaacgaacacgccaaagccgtgatccagtcctgggctgacggcgagtggttccgcaaccgccctaccctggccgacaagatcagcctgcgcgtgttcaaggtgaccggcgaaaccaacaccgacgacctgtcccctgcgccggatgcctggtcccgtccagacatcccgctgcacgccctggccatgctgaaaatggcccgtgaaggcatcgtgcctgacgagcaaggcaagaccggcccgatgaagcagatcgaagaaatgcgcggccaaggcttcccgatcgcctacgtcggtgacgtggtcggtaccggttcctcgcgtaaatccgcgaccaactccgtgctgtggttcttcggcgacgacgttccgtatgtgccgaacaagcgtgccggcggcttctgcttcggcagcaagatcgccccgatcttctacaacaccatggaagatgctggcgcactgccaatcgagttcgacgttaccaacatgaacatgggcgacgtgatcgacctgtacccgcatgctggcaaagtctgcaaacacggcaccgacgaagtcatcaccaccttcgaaatgaagaccccggtgctgttggacgaagtccgcgccggcggccgtatcccgctgatcatcggtcgcggcctgaccgacaaggcccgtgccgagctgggcctgggcccaaccgacctgttcaagctgcctgaagcgcctgtcgacaccggcaaaggcttcaccctggcgcagaaaatggtcggcaaggcgtgcggcctgccagaaggcaaaggcgttcgtcctggcacctactgcgagccgaagatgaccaccgtgggttcccaggacaccaccggtccgatgacccgtgacgaactgaaagacctggcgtgcctgggcttctcgaccgacctggtgatgcagtcgttctgccacaccgcggcctatccaaagccgatcgacgtgaccacccaccacaccctgcctgatttcatcatgacccgtggcggtgtatcgctgcgtccaggcgacggcatcatccacagctggctgaaccgcatgctgctgccggataccgtcggcaccggtggcgactcccacacccgtttcccgatgggcatctcgttcccagccggttccggcctggtcgcgttcgccgcagccactggcgtaatgccgctggacatgccggaatcgatcctggtgcgtttcaaaggcaagatgaaacctggtatcaccctgcgtgacctggttcatgccattccttactacgcgatccagtcgggtctgctgactgtagagaagaaaggcaagaagaacgccttctccggccgcatcctggaaatcgaaggcctgaacgacctgacgctggaacaggctttcgagctgtccgacgcctcggctgaacgttcggctgctggttgcaccatcaagctgtcgaaagagtcgatcaccgaatacctgaactccaacatcaccctgctgcgctggatgatcggtgaaggctacggcgatccacgcaccctggaacgtcgcgcccaagcgatggaagcctgggtcaagaaccctgagctgatggaagccgatgccgacgcggaatacgctgaaatcatcgagatcgacctggccgaaatcaacgagccgatcctctgcgcaccgaacgacccggacgatgcccgtctgctgtcgagcgttgccggcgagaagatcgacgaagtgttcatcggttcgtgcatgaccaacatcggtcacttccgtgccgccggcaagctgctggagcaggtcaagggtcagctgccaacccgtctgtggctgtcgccgccgaccaagatggacgctcaccaactgaccgaagaaggctactacggcatctacggcaaggctggcgcgcgcatggaaatgccgggctgctcgctgtgcatgggtaaccaggcacgtgtagagccgaactcgactgttgtgtcgacttcgacccgtaacttcccgaaccgtctgggtgacggcgccaacgtctacctggcttcggccgagctggcagcggtagcttctaccctgggtcgcctgccgaccgtcgaagagtacatgggctacgccgcgaaactggacaccatggccagtgacgtctaccgctacctgaacttcgaccagattgctgagttccgcaagatcgcagcaagcgccaacatcccggtgattcaagcctaaggtgttgatgtgaagagacgccgcgtatcgtgaggtacgcggcgttttttatgcctggaatgcagtacaaatgtgggagggggcttgcccccgatagcagtgggtcagccaataaatccggcactgagacaccgcgatcgggggcaagccccctcccacatttttaccccgtcaggtttaagcgaagaacgaataaaccaccgcagtaatcgccaccaaccccaccgcggtgacgaacacattggacgcctgcccccggtacttggccatggccggcaccttgcgaatggcatacatcggcatcaggaacagaatcgaagcaatgatcggaccgcccagcgcctcgatcatgccgagaatgctcgggttcaacgtcgccacgatccagcacaccaccagcatgaacgccgccgtcatgcggtccaggcgcttggcctccggacgacgccccgtcttcagcaccaggcccttgaggccttcgctggcgccgatgtaatggcccaggaacgacttggcaatcgccacgaacgcaatcaacggcgctgcgaactcgatggtcgggttattgaagtggttggccaggtacgacaggatcgacaggttctgcgccttcgcttcggccagttgcgccggcgacagggtcagcacgcaactgaacacgaagaacagcaccatcaccaccatcaacagatgcgcacgcgacaggatctgcgagctgcgctcatcggcgtgggcgccgtactggcgcttctggtccactgcaaaggccgagatgatcggcgaatggttgaacgagaacaccatcaccggaatcgccagccacagggtgttgagcagtgcggacggtgccgggacttggctggcggtgctgaggatgccgccgttccaatgcgggatcaggtacaccgccaggaacagcaacgcgacgataaacggatacaccatcaggctcatggccttgacgatcacttgctcgccgcaacgcaccacgcccagcaggccgaggatcagcacgaacgacaggatcgcccgtggcggtggcgcgatgtgcagttggtgttccatgaagctgccgaccgtgttggtcaacgccacactgtagatcagcagaatcgggaagatcgcaaagaagtacagcaaggtaatcagcgcgccggccttgatgccgaagtgttcttccactacgtcggtgatgtcggagcctgcacggccagacagtacgaaacgggtcaggccacggtgggcgaagaaggtcatcgggaacgccagcagcgcgaggatcaccaggggccagaagccgcccaggcccgcgttgatcggcaagaacagcgtaccggcgccaatggcggtgccgaacaggccaagcatccaggtggtgtcctggcggctccagcttgtgagggttgcaggtgtcgttgcatagcgttcgtcgacgctattggcctgatcattcatccggtcggatctccgcatttacacagccgggacgagtcagaaaaacctgacaggcagcgccccgaccatagaaggggccggattgtccgggattcttgtgaataagcaaagacttagctgaggaacggtggtgcggtacaggcccgcaggggcggctgtaggcggcgattttcgcggcgcttggcgagatacctgatatacattcccgcacaaatctattttagaatttcacacgttactgtagttttcacacaacgcccaccgtgtatccagagagccccgccatgcctcgcgtctcccgcaaacaagccgatctcaaccgcgaaatcatcgtcgaggccgccacgcacctgtttcgcgaacgcgggctgcatggcatcagtctgtcagacgtgatggccgctgccggcctgacccacggcgggttctacgggcacttcgcctccaaggaggccctggccaccgaagcctgccaacaggcattcgagcacgccaacctgggctggcaggccaaaatcgagcacagcgacgatcaacaggccgcccgccaggcggtgctggggccttacctgaccgccacccatcgcgacaaccctggcgacggttgcccggtctcggccttcgccccggatatgtgccacgaacccgctgataccgccttgcagcacacctttatagaaggcgtggaaaagtccctggagattttctctcaactggacgacggagaccgtcaagccatgctggcccattacgcgatgatggtgggcgcagtcaccttggcgcgtgcgacacggggcaatagcctgtcggacgagttcctgaaggctgcaagaaataccctgttgcccgttgacagcccttcccccatcccagcatgatcgggccatgaacattatccagctcgtcctcacccgtaccaccatcacgaccgcttacggcgggtcgcgcggtggctgtgggtgcttgagctagacacttcacagatccaacccaaggccccgccagcaatggacggggcctttttttgctccgtccgttcggcaaccaccaggagcaacaccatggctgacgccctgctgatcatcgatatgcaaaccggtttatacgatggcccggacaaaccgtttgaacgcgaacgcgtgctcgcctccatcaaccagctgattcatcgtgcgcgcaacgcaagcgtaccgatcttcgtggcgcgccacaccggccctgggggctcaccgattgcagccggcagcccgttctggcagctgtggcatgagctagaggtcgacgaatcccgcgattacctgttcaacaagacccgtcccagttgcttcctgggcaccgatcttgagcagcaactgagcgcggcgcaggtcaaggagttggtgatcgtcgggatgaaaacccagttctgcatcgacactacctgccgggtcgccgtggagttggggttttcggtggtgctgcccgaagatggtcatacctgcatggacacgccggcgctaaaagccgaggcgatcatcgagcatcacaatacgaccctggccggtgcgtttgtaaagcgggccagcgtggccgagatccgcttctgaccgcacaaatacggcatactcctcccctcaaacccttcaggaagagccttccgatgaccgctactgttctggtcctggttgaaaccatcaacgaatacctgcccatcatcgagggcaatgactttcatgtgatcctggcgccgacccctgccgaacgcgccgaagcgatcaaggcccacggcagccagatcaaggcggtgctgacccgtggcccgctgggcttgtacgccgaggaaatcgccgccctgcccctgctggaaatcatctgcgtgatcggcgccggctacgaacacgtcgacctgcaggccgccagcaatcgcgggatcgtggttaccaacggcgccggggtgaatgcgccgtcggtggccgatcacgccatggcgttgctgctgtcgctggtgcgcggcatcccgcagaccgacgccgcggtgcgccgcagcgaatggcccaaagtgatgcgcccgtccctgggcggcaagcaactgggcattctcgggttgggcgccgtgggcatggagatcgccaagcgcgctgccctggggttcggcatggaagtgagctatcacaaccgccaaccgcgtgacgatgtggactacacctactgcgccaccgccgttgaactggcgcgcacctcggacttcctgatcctggccacgccgggcggcgccagcactcgccacctgatcgaccgccacgccctggatgccctggggccgaatggctacctggtcaatatcggccgtggcagtgtggtggtcaccgccgacctggtcgccgccctggagcagcgtcgcatcggtggcgccgcgctggacgtattcgacgacgaacccaaggtgcccgacgcgctcaagaagctcagcaataccgtgctcacctcccacgtggccggactgtcgccggaagccgcccacgacaccgtgcaacgcgtggccgacaacctggtggagtactttgccggccgcccggtgctcaccccggtcgccctgccccccgcccactaaatgaccgatcaggcacgctgatcatcgtccaacacgctaacctattaagccgccccgaccttgtcgctgggcggctgcgcgcattagattaggaaatagtccaaggcctttagaataagcagaagggataagcatggcgctgaacgaccaatcgacccagattcgcccaggcgaagagcttgatgccagcctgatcgatccctacctcaaggcccatatcccgggcctggacggcacgcccaggatcagccagtttcccggtggtgcgtccaacctgacctacctgctggaataccccggccaggaattcgtgctgcgtcgcccgccctttggtcacaaggccaagtccgcccatgacatgggccgcgaataccgcattctcaaccagctcaaggacggcttcccgtactgccccaaagcctatgtgcattgcacggatgagtcggtgatcggtgccgagttctatgtgatggagcgcgtcaacggcatcatcctgcgctccgacctgccagccgaactgggcctggacgccagcaggaccgaggcgttgtgcaaaagcttcatcgataagttcgtcgaactgcaccaggtggactaccacgcctgcggcctggccgacctgggtaagcccgagggctacgtggcacgccagatccgcggctggagcgaccgctacgagaaagccctgacccccgacgcaccgcgctgggaagcggtacgcgcctggctcaacgacaagatgccggccgatcaccccacgtccagcatcgtgcacaacgactaccgcttcgataacgtgatcctcgatccgcacaacccgatgcagatcatcggcgtgctggactgggaactcaccaccctcggcgacccgctgatggatctgggcaacaccctcgcctactggatcgaagcggcggacccggcaccggtgcaactgatgcggcgccagccgagcaacgcccccggcatgctcacccgccgcgagttcgtcgactattacgccgagcgcgcaggcctgcagatcgacaacttcgacttctactacacctacggccttttccgcctggccggcatcgtgcaacagatctactaccgcttcttccatggccagacccaggacaaacgctttgcgcagttcattcacatgaacaagctgctcgagcagatgagcctgaacgtcatcagcaaatcgtccctttaaggaaccgctatgtccaagacccacctgttcgacctcgatggcaagatcgcattcgtttccggcgccagccgtggcatcggcgaggccatcgccaagttgctggcccagcaaggcgcccacgtgatcgtctccagccgcaagctggaaggctgccagcacgtcgccgacgcaatcatcgccgacggcggcaaggccacggccgtggcctgccatatcggagaaatggagcagatcacccaggtattcgccggcatccgcgagcagttcggccgcctggatatcctggtcaacaacgccgcgaccaacccgcaattctgcaacgtgctggacaccgacctcggtgcgttccagaagaccgtggacgtgaacatccgtggctacttcttcatgtccgtggaagccggcaagttgatgcgcgagaacggtggcggcagcatcatcaacgtcgcctcgatcaacgggatctcgccgggtgtgttccagggcatctactcggtgaccaaggccgccgtgatcaacatgaccaaggtgttcgccaaggaatgcgcggcgttcggcattcgctgcaacgccctgctgccgggcctgaccgacaccaagttcgcctcggccctggtcaagaacgactcgatcctgaaaatggccctggcgcagatcccgctcaagcgcgtggccgagccgagcgagatggccggtgcggtgctgttcctggccagtgacgcgtccagctacaccaccggtgtatcgctgaatgtggacggtggtttcctgtcctgatcaggcattcggcggctgttgccgaaagctcaccgccaggcggttccagccactgatgctggacaccgccatggtcaggtccaccagttcctgctcgctgaactccacacgcaccgccgcatacagctcatccggcaccgtcgaggtgggcagcgtcgccaccgactcgctccaggccaatgcagccttttcccgcgccgtgaagaacggcgaatcccgccatacgctcaaggcaaacaaacgtcgctcggtttcgccgcgttgacgcgccgccatcgagtgcatgtccgtgcagaaaccacagtagttgagctgcgatacacgaatcttgatcagctccagcaaaggtttttcgatggacaggtcgaaggtcgtcgcctccagcatcagcatgcccttgagcgcttgcggcgaggcggtgtagtaatccaggcgaggttccatgggcgtttctctgaggttgcggcaaggacagtccagcctagagcccgcatggaataagccctatagccaatcggccggtttacgcacagaccattttgcgccagccctgcacgcgcgtactcttggcgcagattgaatgccctgggacaagtcatggaactgcacgttgtaatcaatggccgcaaggacctggccgaacagctctatcaacagctgcgcgaagccatcgggtccgggcgcctggccgccggcgcgcaactgccgccaagccgtttgcttgccgaacaattgggcgtgtcgcgcaagaccgtgtctgacacctacgccacgctgacctacgaaggcctgctggtgggcaagaccggtcgcggcaccttcgtcaacgcaagctcgccgcagtccgagcgcgtgcaaaccgccgccgacctggcctgtgccgccaacctggcgaaatggcaggcgctgccctcgccgatgcgtcatcccacacgcgatagcaccttgcgctatgaatttatcggcggcgccaccagccgcaaccagttcccccaggacgaatggcgccgctgcacccaggacgcgctgcggcgcattgcccagaacagtggtttctacagccaacccgagggcttgccggcgctgcgcagcgcgatcgccgggcacatcgcgttctcccgtggggtcaactgccgcgacagcgacatcgtggtcaccaacggcgcgcaacaggcgctggacctgattgcccgcgtggtgctggaaccaggcagcattgtggccatggaagaccccggctacagccctgcccgccagatgttcatcgcggtaggagcccaggtcgccagcgtgccggtggacgaacagggcatccgggtcgaccggatccccgatggcacacggctgatctacgtgacgccctcccaccagttccccctcggcatgccgatgagcctggcacgtcgcgaagccttgctggcgcgtgcgtttgcgctgggcgcaatcatcatcgaggacgattacgacagcgagttccgttacgaaggacggcccaccgactcgctgcaaagcatggacacccgtggcgtggtgacctatgtgggcaccttctcgaaaaccctgctacccgagctgcgcctgggctacgcagtgctgccgccggccatctacggtgcggtgctcaaggccaagcaattgaccgaccagcacagctccaccctgccccagtgggcgctggccaagttcatcagtgagggctacctgctcaagcacatccgtcgctgccatacggtctacgccgggcgtcgcgaacgcatcctgcaacgcctggcgggggacctgtcgccgtggttcgaagcggtgccgaccgtggccgggttccacatggcggcgctgtgcaaggtgccggtgaatatcccgctgctgatggagctcgcacgccgggtggaagtgggcttgtaccccctggatgtgttcttccacgacgcgccggtacgctcgggcctgatcatcggcttcggcgcgatcgagaccctggacatcgacccggcgctggacaaggtgcgcgatattctccagcagattggctagcgaattttccgccggattggtcattggtcctgtcaccatcaggctctagcctgtgcactgccacccgacctcggagaccatcgccatgcaagcctttgcctataacactgtccatatccgcgcggcggtcgggcgctcatcggaactgggcgaacgcctgcaagggattgtcgacgccgtacgcaccgcgcccggttgcctggattacaccattcagcgcgacccggtggaccccgacctgtggaccgtcaacggccgttgggcctgcgtccgacaactcaacgcccacttcgcgctccctgcgctgcaggggttcatcgaactgacccgcgaacacctggccctccgcctggaattcgaccactgaggcattggcctcctggtcttcgcagggattggtcattggtcacccaggccttgcggcgtagggtgaacaggtctcgaactactcggaaacttcatcatgaaacgattgctcgccgcctccctaatgctcgcctcgctcagcgcctttgctcatgaaccggtgtacaaccaggagtcgatcaaggtcttgcaggagcacgcgctgaccaatgtcccgggcaagaaaaccctcatgctcaccgtcgactatgcccccggccaggccaccgtgccccacagccacacgggcaccgccgtggcctacgtgctggaaggcgcgatcacttcacgggtgaatgacgagcccgcaaaaacctacaaggtcggcgagtcgttctacgagccggccggttcccggcacttcgaatcgagcaatgccagccagacccaaccggccaagctgctggtggtgatggtgctggatgacaaggccgaggtgcttacccccctgcccaagtaacccgccacgccacaaaccagaaaggtgggagggggcaagccccctcccacattttgatttgcatcggtcagtgactcaggggcgctggaactggcggcgcaggccttcgatccgctcgcggcaggcgcaaccttccaagtgatcattgaccatgcccatcgcctgcatcaacgcatacatcgtggtcggccccacgaacgtccagccgcgcttcttcaaggccttggacaagcgcactgaggccggcgacgtgggattgcccgtccagtaagccatgtccaccaccgccggccgttcctcctcaccgggttcgaacgcccacaaccagcgcgccagcgacccggtctcatccaccagctcacaggcgcggcgcgcattgttgatcgtggacacgatcttggcccgattgcgcacaatgcccgggtcctgcatcaagcgcgcgatatccgcctcgccgtactgcgccacccttatgaaatcaaagccctcgaatgccgcccgaaactgttcacgcttgcgcaaaatggtgatccacgccatgcccgcctgaaagccttccaggcagatcttctcgtacaactggatatcatccgccaccggcacgccccattcggcgtcgtggtaacgcgggtattccggcgccgccgtgcgccagctgcagtgggtgtgcccattgtcgtcagtggtcagtcctggtgtgtccatccatcacctcatgtgccgagcagcggatgataagcgaaaaaaattccaccccgccaaccgctcaagcatcgcccttaccgaccaactggtcagaccgggacctgtcaaccgccaaataattgcttgtgatttcaaaaataccgggcgtagactggccccgcactggacttaccggtaagaccacaacaattaagccctggaaccaccagggcaccgaatagagatccctcccatgctcagatggtgctcgcgttcgattttcctgcaagtcgtgattggcctgatgctcggcatcgcctgcggcctggcccttcccgaattctcctcgcaactcaaacccctgggtgacggctttatcaagctgatcaaaatgctgatcggcctgatcgtgttctgcgtggtggtcagcggcatttccggcgccggcgacttgaagaaagtcggacgcatcggcctcaagtcagtgatctacttcgagatcctcaccaccgttgcgctggtgatcggcctggtcatggccttcagcaccggcatcggccaaggcgccaatatccacctggaacaattgtcctccgctggtttgaatgaactggccgacaagggccagcacatccgcggcaccagtcagttcctgatggacctgattcccaactcggtcatcggtgcctttgccgacaacaacgtgctgcaagtgctgctgttttcggtgctgttcggcagcgcgctgaacctggtgggcgaagcggcgtcgggcatctcgcgactgatcaacgaactgagccatatcattttccgcatcatgggcatgatcgtgcgcctggcgccgatcggtgtgttcggtgcaatcgccttcaccaccagtacctacgggctggactcgctgcagcacctggggagcctggtgggcctgttctacctgacctgctttgccttcgtcgcgctgatcctcggcctggtgatgcgcctgtcgggcctgcgcatgttgccgctgctcaagtacctgcgtgaagaactgctgatcgtgatgggcaccgcttcctccgacgccgtgctaccacagatcatgcgcaaactggagcacctgggcattggcagctccaccgtcggcctggtgattccaacggggtattcgttcaacctcgatggcttctcgatctacctgaccctggccattgtgttcatcgccaatgccaccggtacccccctgtcgatgaccgacctgttgacgatcctgctggtatcgctgatcacctccaaaggcgcccacgggattccggggtcggcgctggtgatcctggcggcgaccctcacggcgatcccggcgattccggtggtgggcctggtgctggtgctggcggtggattggttcatgggcatcggccgtgcattgaccaacctgatcggcaactgcgtggcgaccgtggccattgcccgctgggagaaagacatcgacatccagcgcgccaacaaggtgctcgacggtcagcaaggctatgccttccaggccaagaagccggtgttgcccgcacaccaggagttctgaaatgtgggagggggcaagccccctcccacacatccattcgcaacatcaaggagacgcacgacgtgatcagcacctcaaccgtcgtcaattcagtcgtagaaaaactccgcgccgccttggcgcgtggtcagtggcgccggggtgaaatgctccccggccagcgcgaactggccgaacagatgggcatcagccgccccagcctgcgtgaagcggtcatcgtgctggagaccctcggcctggtgcgatccatgcccggcaaaggcgtggtggtgctggaaaccagcgtcagcgaaccgcagtccagcgatgccgtggccgacgccagcctggaagacatcctgcaactgcgctacaccctggagccgttcattgtcggcctggtggcccagtccatcagcagcaaagaggtcggccaactgcgcctgaccttgatggacatgcgcgaagccctcgatgccggtgacgctgaagcgggcatgaacgcctacatcggctttcacgaggaactgttcgccctcacctccaacccgatcttccagaacgtggtgcagcagaccagcaacgccctcaagcaaagcgcccaggtgctgcgcaactcgcccgaacacctggccgaacgcctgcaggaaaacgaagccgtggtgcgcgccatccgcaacaagaacagcgccctggcgagtgccgagatgcgccggcacatcctgcaggaaggcctgcgcatgggcattgccctgaacatcccggacgaccatctcggcagctgattttttggagacaggccatgaccgcccacgccttgcactacgaccccatcctgccgaccctgcgcctggtcgccggtaaaaagccttcggtggatgacatctacccgcgcttgttcgacgccatcctcgaacaacgtatcgccccggccagccgttttaccgaagaaggcctgggcgaaacgtttggcgtgagccgcagcgtgatacgccgggtgctggccaagctgtcccatcagcaagtgatcatcctgcgccccaaccagcgtgcccaggtggccgcgccggatgctcagcagacgcgacagatcctcgaagcgcggcgcatgaccgaaatcactgtggtgcagttggcctgcgcccaagcgacagccacgcagatacgtcagttgcgcgaactgattgcacgggaacgtgattgcatcgaacgcgatcagcgtgggccggcgattcggttgtcgggggagtttcacctgcatttggcgacgatggccggcaatgcgccgttggcgcagttcctcaacagcctggtgccgttgacgtcgttgatcattgcccagtacgaggcaaaggcctgcacgtattgcgcgtggcaggagcatgtggcgattgtggatgccgtggagcagcgcgattcaaacgctgccgtggccctgatgaaccagcacctggctcacctggaaagcaaattactgaaacaccactgatatccagataataaagatccaaatgtgggaggggcggtgcgacgattcgacttgcccccgatggcagtgtgtcaatcaatgaagatgttgactgatacaccgccatcgggggcaagccccctcccacattggtttcaccaggggtctaggccggttgcaacaccgactgcccactcaacgccaggtccagcaactcacggttggctaccgcgtacatggcgtagtccgtgccgaccgcagcacggatttccaccatcatcgccacccaacgctcggccatgtccttgtgctgctcaagccacagggccacgcgggcttccatgtcttgtggcgcatcggccatttgcaggacggaaatggtgatcgcgcgttgctgccagtccacatcgtcgcggaacgcttcgcgggcctgggcctgccagttgttgcccaccggcagatcactgatctgctgcaggtaccacggcaagtccaaggcgctgccgacggcgaagtaggccttggccacttcggcggcgtcatgcccggtcacgtcagcggcttcaatgatcggcagcaaggtgtacaggtgggtcgtgccagcaaccatgcgcgccaacagttccggtacgccggcttcggtgtaggcctggtagcgcttctgccagccttcgcgggtcgggccttccagcagttcgtcgagcttgaggcccagcgccgccaggtgcggaccgaagtgcgcggtgtcacggccagcgtcctgctcgttgcgacggctgcgcaggaaccagcgcgtggcacgacggcccaggcgcatcagctcgtccatcaactgcaattgcacgtcggcggagacctggtggtccagggcttcaatctgacggaaccagtgcgggaggtggaagatgtcacgcacgatcacataggcgccagccacgttcgccgggctcatgccggtcgactctttgagtcgctgcacgaaggtgatgcccatgtggttgaccaggtcgttggcgatctgggtgctgacgatctcgcgcttcagacggtgacgacgcatggcctcaccgaacttggcgaccaggctcggcgggaatgcggtctccatgtcacgagtcaggtaatcgtcatccggcaccagcgacttgagcagcgcttccttgaggtcgatcttgctgtacgagatcagcaccgacagttccggacgggtcaggcccttgccgttggcggcgcgctcggtgagctgctcctcggtcggcaggtactcgatagcgcggtccagcttgccacggccttccaggtcgctcatcaggcgcttgtactcggcggcacgctcgtaggcacggcgcgccgccagggacagggcctgggtctgcttgtagttgttgcccaacaccaggctgccgacttcgtcggtcatgctcgccagcaactggttgcgttgcttgtcggtcatatcaccggcctgcaccacttcgttgagcaggatcttgatgttcacttcgtggtcggagcagtccacgccaccggcgttgtcgatgaagtcggtgttggaaccgccgccattgaggccgaattccacacgacccagctgggtcatgccgaggttaccgccctcgcccaccaccttgcagcgcagctcgttgccgttgacgcgcagcgcgtcgttggccttgtcgcccacgtcggcatgactttcgctgctggccttgacgtaggtgccgataccgccgttccacaacaggtccaccggcgccttgagcaaggcgttcagcagttcagtcggggtcagcttgtcggccgcgatgtcgaagcgttctttcatctgtggcgagatggcaatgctcttcgcgctgcgcgagaagataccgccgccttcggacatgatgctggtgtcgtagtcggtccaggccgaacgtggcagctcgaacatgcgctggcgctcgacgaagctggtcgccgggttcgggtttggatcgatgaagatatgcaggtggttgaaggccgcgaccagttgcagcttgtcggacatcaacaagccgttaccgaacacgtcgccggccatgtcgccgacgcccaccacggtgatgctgtcttcctgcacattgatgccgcgctcacggaagtgacgctgcacgccgacccacgcgcccttggcggtgatgcccattttcttgtggtcataaccggcagaaccaccggaggcgaacgcgtcacccagccagaagccgtagtcgatggcgatgccgttggcgatgtcggagaaggtcgcagtgcccttgtctgctgctactaccaggtacgggtcatcgtcgtcatggcgcacgacgttggccggtggcaccagggcgccatccttgaggttgtcggtaatatccaacaggccggaaatgaagatgcggtagcaggcgatgccctcggccgcgatctcgtcacggctgccgcccaatggcaggcgacgcggcaagaagccgcccttcgcacccaccggcacgatgaccgagttcttcacttgctgggctttcaccaggccaagcacttcggtacggaagtcttcttcacgatcggaccagcgcaggccgccgcgcgcgacgttgccgaagcgcaggtgcacgccttcgacccgtggcgagtacacgaagatttcgaacttcggcacaggcttgggcagctcagggatcgcgtgcgggttgaacttgaagctgaagtacgacttgttctggccgttcgcgtcggtctggtagaagttggtacgcagggtcgccttgatcaggtccaggtagcgacgcaggatgcggtcttcgttgagcacctggacgtcgtcaagggcggtgaggatcgcttgttccagacgttgctgcttgtcttccaggtcgtcgctggtgagcttgcgcgccaggtagaaacgggtcttgaacaaccgggtcaactcgcgggcgatgtcggtgtggttgttcagggtgctggcgatgtaacccaggtcgaagcccaggcggatctgcttgaggtagcgggcgtaggcacgcagcagcgcgacgtcgcgccacggcaggccggcggtgagtaccaggcggttgaacgcatcgttctcggcgtcgccatgcacgatgtgcacgaatgcgtcctgcagagtgtcgttgagctgctggatatccaggttcacgccctcggcggcgatgaacgcgaaatcatggatccagaactcgcggccattggcgtgacgcaggcgatacgggaactcaccgagcacgcgcaggccgaggttttccaggatcggcagcacgtcggacagcgccagcggggtgtcggcgtggtacagcttgcaatgcagctcgcgctggccggaaacctggcccagcggctgatagaaactcatcaccagcgggttggcctcggtgaggctgagcaagtgctgcatgtcgaccaccgccgaatgcgcggcaaagcgctcgcggtaaccggccgggaagcctttcgggaagtccgccagcacgttggtgccatgggcttcgccgaagctttcgacgacgaggctggagtagtcgtcctgccagctgcggcaggcctgcaccacttctttttccagttgcagcgggtcgatgtccaggcggttcttcgggtctacccgcagaatcagctgcacgcgggccagcacggactcggagaagaaggtccagaactcgcagtccgaagccttcaggcgatccatcaatacttgctggatcttctggcgcacttcggtggaatagatgtcgcgtggcacgtaggccaggcagtagcagaatcgaccgtacgggtctttgcgcaggaacacgcggatcttgttgcgttcctggatctgcacgatcgacatcacggtgctgaacagctcgtcgaccggggtctggaacagatcgtcacggggcagcacttcaacgacttgcgccaactccttgcccaggtgcgccttgggctggaagccggagcggcgctcgatttccgcgaccttgcggcggatatacggaatcacccgtacgctttcgccgtacaccgacgaggtgtacaggcccatgaaacggtgttccttgatgaccttgccatcggcgtcgatttcacggatcgacacatagtccgggtaggctggacggtgcacgcggcttgggtgcgcggccttggcgaacgaaagcatggtcggttcacgcaggtaggcgacggcatagtcttcgatacgcaggtcttcggcggtgagcccggcgcgcagcagtttggtcagaccgaggaaggagtcggcgtcatattcgatatgaccgccatccgcctcgtcacgtaccacgaactcttcatagccgaggaaggtgaagtggttgcccaccagccattccaggaagttcttgatctcggccttttcttcgccgtcgatggcgaactggcttgcgtcgataccggccagcaggtcctggaccttggctttcatcggctcgaaatcggccacggccacacgcacttcacccaacacctgctcaagctctttgctcagcacgttcagttcggcggcgttggcgcaacgatcgatttccaggtacatcagagattcttgctggatgccttcgccctgggtgccttttggcaggatttccagcaactcgcccttggcgccacggcgtacgctgagcacggtggtctgcaaggtgtggatgctgtagccacggcggttcagctcggtgcggaccgagtccaccaggaagggcaagtcatggtgcagcacttcgaccgcggtgtgggtcgactgccagccatgacgttcgtaatcggggttatagacccgcacttgcggttgggtgtgatcaaagcgctcaagcaggcgccacgcagagagggtgcaaccggccaggtcggaaaggcgacgctgggtcagttcgtccagggaaatgatgccgaagaattgttcagcgaacagcgccacttgtggcagtgcctgttcactgatgtgctgcgccagtgccgcttgcagttgatgctggaagtcggccttgctggctgcggtgaaaaacgccatctgtggtactccgctcgggcttgttattgatggaagcgtcgcgtgttatccccttgcggggagaccgtcagcgctgttcgctgggtgacgagtaaagcaccataaacgaatcagggtgacaggtgggtgaagctggacaagacaatgaggtcacatacaacttccataagatgtgcacctagccgggtgacggtacgacgggcaggtcaggcgccaggctcgtgcacatccgttgcgcagcttaacgagtgtaggaagccagctgcttgcgacgctgcgacatattcggtcatcggtaagcaggcgccgggttgcgacttgggcaacccgtcattcccggcagaaaatccggctacttcgacgccggcgagtatcagaaatgaccgatgttgcccgtcaggtcatgcactgggtctgacacaggaagcagcacaaaattcgccgcaatggcacaattgcccgcatcacgccctaccccagacaggattgcccatgctgcaactgaaaaccgacgccctgatggccacgccgtgcgacgacgaagaagacaacatggccatgctctgctgccacggcaagaacggcgagatgttcatgctcacccgttacccggacgaagacgaagtggaattgacctgggactacgagccgtcgacgctggatgggctgaaggtcacgctgagtgacaccatcctgctgatcgaactggctgccggggatgccgatgccctgggtggcaaggaccagttgcagattacccacgccaccgctgcgtcggacctggtcgaagtcgagcaaaccctgcaaaacatcctgaaaggcaccggcactttcacccgaatttaaacggcacccacaatcaaatgtgggagggggcttgccccctcccacatcgaccgtgttcccacacaaatttcctacaagatttgccaaaaatacccgtcacgccgttagtcgccacccccctccatgcattaaagtagacgccccaggccttggcatttttcacaaccccaaggctcatctctccaggaaccgtcatcgatggaacatcgtgaagcgctgcttgcgctgcgaacctttctttctacgcagattctcggccaggaaaaactcatcgatcgcctgttgatcgcgctgctcgccgacggccacatgctggtggaaggcgcgccgggcctggccaagaccaaggccatcaaagagttggccgaaggcattgaagcgcagttccatcgtatccagttcacccccgacctgttgcccgccgacatcaccggcacagagatctatcgtccggaaaccggcagcttcgtgttccaacaggggccgatcttccacaacctggtgttggcggacgaaatcaaccgtgccccggccaaggtgcaatcggcactgctggaagccatggccgagcgccaggtcagcgtcgggcgcagcacctatgacctgtcgccgctgttcctggtgatggccacgcaaaaccccatcgagcaggaaggcacctacccgctgcctgaagcccagctcgaccgtttcctgatgcacgtcaagatcggcttccccgacgccgccgtcgagcgacgcatcctgcaacaggcccgtggcgaagcgctcaacggcgaaaccaagccggaacgccgcgtcagccagcaggcgatcttcgccgcacgcaaggaaatcctcggcctgtacatggctgacgccgtggaggaatacctggtgcagttggtgatggccacgcgcaccccggccaagttcgacccggagatggccgagtggatcgcctacggcgccagcccacgcggctccatcgccctcgaccgctgcgcccgtgcccatgcctggctggccggtcgcgactttgtcagcccggaagacatccaggcggtgctgttcgacgtactgcgccatcgcatcatcctgtcgttcgaagccgaagccgccggcatcgaccaggaccgcgtggtgcaacgcattctcgacgtcgttgccgtcgcttgaaacccatgaacgccagcgatggggtccgcgtcacgctcagcgagttgatcgagatgcgccatcgcgtgcgcgaagtgcagctgttttccaccccgagccagcgcagcccgttgatcggcctgcaccactccaagctgcgcggacgcggggtggacttcgaccaggtgcgcgtgtaccaggccggggacgatgtgcgcaccatcgactggcgcgtgacggcgcgcacccaggagccgcacaccaagctgttccatgaagagcgcgagcggccgatctttatcatggtggaacaaagctgccggctgtttttcggctccgggcagatgttcaaggcggtgctcgcagcgcaggcagccagcctgatcggctgggccgcgctgggccacaacgaccgcgtgggcgggctggtgttcggcgacagcgagcactacgaaatcaaaccccggcgcagcaaacaaagcctgctgcaactgctcaaccgcctggtgcgagtcaaccagagcctgaataccgagagccgccccgaagccgacgccctcggcatggccctgcgccgtggccgcgaagtgttgcgccccggcagcctggtgattgtgatctgcgacgaacgtgcgctgaccgagggcgccgagcaacaactgagcctgctgtcacgccactgcgacctgctgctgctgccgatctccgacccgctggaccacgccctgcccgccgccgggctgctgcgtttcgccgaacgtggtgcgcagttggaactggatacgctcaacttcgacctgcgccaggcctacaaggcccaggccgaagcgcgcattgcgcgctgggaactgctcgcgcaaaagctgcgtgtgctgttgatgcccttgagtacccagagcgaaatggtcgagcaactgcgtgaatacctcaacccgcaacgcccggttaaaaaacaatgagcagcctggaccaactgcagccgctgatcgccccgcccgccatcggcttctggccgcctgcgccgggttggtggctgttgctgctggcgattccgctgctcggttggggcctatggtcgctgcgccgcttcctgccggcccgccgccccgtggcgcgcgccgaacaaccgctggacccgctgcgcattgccgccctggcggaactggcgctgatgcccaaaccctacgacggcgcgcctgccggcgcctggctgcaacagctcaacggcctgctcaagcgcctgtgccgcaacgactacccctacagccagagccacaccctcaacggccgcaaatggctggcattcctcgacaaccgctgccccgccgccggcctcacgcgctggatggtgttggtggaaggcgcctacaaacccgaatgcaaactcgacgacaaggccatcgccggcctgacccaagcggtcgatacctggattcgcaaacatgtttgaattcgcctggccgtggatctttgccctgttgccattgccctggctgatgcgcctggtgctgccggcagccgacagcggtgagcccgccctgaaagtcagctacctcagcgacctcgaaggcctggcccgccgccgcgcccgcgtcaacctgccaggctggcgccagcaagcaccgttcgtggtgctgtggttgctgctgctgaccgccgccgcacgcccggaatggctcggcgaaccgctgcccatcgccgccagtggccgcgacctgctggtggcggtggacgtgtccggctcgatggattttcccgatatgcactggcaggacgaagacgtgagtcgcttgagcctggtcaagcacctgctcggcgattttcttgaagggcgccaaggtgatcgcgtcggcctgatcctgttcggcagccaggcctacctgcaggcaccgctgaccttcgaccgccgcaccgtgcgcacctggctggatgaagcgcgcatcggcattgccggcaagaacaccgcgattggcgacgccatcggcctggccttgaaacgcctgcgccagcgtccggcgcagagccgcgtgctgatcctggtcaccgacggcgccaacaacgccgggcagatcgacccgctgaccgctgcgcgcctggcggccgaagaaggcgtgaagatctaccccatcggtatcggcgccgatccggaacagaccggttccctgggcatcctcggcgtcaacccgagcctggacctcgacgaaccggcgctcaaggccatcgccgaagccactcatggccagtacttccgcgcgcgcgatggcgaagagttgcaagcgatcaagcaaaccctcgacaagctcgaacccgtcgaacaacaacccacccaggcacgccccgccctggccttgtacagcgcgccgctggccctcgcgctggtgctgagcatgttgctggtgatccaggaacgttggccgaacaacgccctgcaacgcgtgttcaataaactgtcgagcaagggcatgttcctgcagcaacacccggaatggcgccaacgccttaaacgcctgcgtttgcggaggcgtcgatgatcgacctgtggccgcactggttccgtccctggtggctgttgctgctgccgttgctcggctggctgctgtggcacctgtggcaccggcaaaagcgcgccgggcgctggcagatgatcttgccgccggccttccacgcggtattgctcagtggtggcaacggccgcgagagtaaatcgccttgggtggtgctcggcatcgcgtggctgttggcggtgctggcgttgctcggccccagttggcaaagggttgaacagtccagccagaagccgtccgacccgttggtggtactgctggaactgaccccggaaatgctcgccaccgacagcccgcccaaccgcctggagcaggcacggcgcaaactgtacgacctgttgcaggcgcgcaccgacgcgcaaaccgccatcatcgtctacgcgggcagcgcccacacgctggtgccgctgtcggacgacctggccaccagccgcaacctgctggaagccttgcgcccctcgatcatgcccgaaccgggccaccgcgccgacctggccgtcgagaaggcgctgggcctgctcaagcaaggcggcctcggccaggggcgcctgttgttgatcggttcttcgttgtccaaacaggagcgccagggcatccgcctgctgctgcaaagcggccaggcgccgagcttgtcgatcctcggcatcggcagccgcgagggcacgccggtgacccaggagagcggcgaattcctcaaggacgaacaaggcgcgatcctggtgccgcgcctggacagcccgaccctcaaggccttcgccagcgaaatgggtggccgctaccgcgctgcgcggctggacgacaaggacctgcgccagctcggcgtgctcgacccaccgcaagccctgcgcaacgatggccagttgctgcacctcgacacctgggccgaccagggttactggctgctcctgcccctgctgctgctggccgcctgtgctggccggcgtggctggctgttctgcctgccgctgctgttgttgagcgcgccgcagcccagctatgcgttcggcttgcaggatttgtggttgcgccccgaccagcagggccaatatctgctgaagaaaaaacgccccgccgaagccgccgaacacttccaggacccgcaatggaggggcgtggcgctttacgaggccggcaactatgccgaggccatcaagctgttcgccgagggtaatgacgcctactcccactacaatcggggcaatgccctggcaaaatccggtgaactggaagccgccatcgacgcctacgagcaagccctcgaagcccagcccgatctgcaaccggcgctgaaaaacaaagcgctggtggaaacccttatgcaggaacaggcccaaccggagccgcctcctgcggcaaaaaacgaggatgacgaaaccacccaacccggccaaactgcgcaaccgggcggcacggggcaaaacgccacggggggcgaacagtcatcccaaggccagggcgaagccggcactggcgacacccagcccggcaacacgccgcaaaccgcgggcaatgaagtgccgggcagcgaactgggcgacgaacagaccactaccccgccgctgcggcccaacgatgccagccttgacggtgaacatcgccaggccctggagcaatggctgcaggagatcccggacaaccccggagaactgctgcgccgcaaattctggtacgaacagcaacaacatcaggacaagactcgatgagccgccgcaccaccctactgtttctgctcgccctgtcggcaggccacgcccaggcggcgagcctggtcgccagcgtcgaccgcagccgcgtcaactccggggaaacggtggaactcacggtggaatccagcgacgtgacccagttcggcaagcccgacctgtcgccgctggatgcacagttcgaagtcagcggcacgcggcagatcaaccagctcaccacgctgggcggcgacaaccacgccaccacgcgctggatcatcaccctgctgccccgggaaaacggcacggtggtcatcccgcccctgcaagtgggcgaacacaagacccagccgatcagcctgcaagtggtggaaaccgccagccagaacactgctgccgagctggcgccagtgtttgtcgaggccaacctcgaccagaccagcgtctacgtccaggcccaggcgctgttgaccgtgcgcgtctaccactcggtgtcgctgtatgacgacagcagcctcacgccgttgcagattgccgatgcacgcgtggagcagttgggcgagtcgcgcacctacgaaaaggtcatcaacagcatccgccacggcgtgatcgagacccgctacgccatctacccgcagcacagcggcacgttggcaatccctgcgcagactttcagcgcgacgctggtggaatcgcgcccaccccaggaaaacaccctgcaaggcaccaagccgggcaagttgatccacgtgagttccgcagagctgccgctggtggtcaaacccaaaccggcgctgtaccccgccgatacgccgtggttgccggcacgcagcctgaccctgagcgaaaactggaaccccgaacccgagcacgtgcaagtcggcgactccctgacccgcagcctcacggtcaaggccgaaggcctgtccagcgcgcaactgccggcactgcccagcaccgaagtcaacggcctgcgccgctacccggaccagccggtgctcggcaaccagaccaacgaccgcggcctgatcggcagccgcgaagaccgggaggcgctcgtgcccacccgcgcaggtaacctggaactgcctgccgtggacgtggtgtggtggaacacccacgaagaccacctggagcgcaccagcctgcccgcccgcaccgtgcaggttgccatcaacccgagcctggccgtggatacccccgccacaccgacggtgatcaccgcaccggacgatgagcgcctgtggctatggcaactgagcacgctgatcctggcctgcaccaccctgctggggtttggcctgtggtggcgtgcacgtcggcaaccggccgtgcagcgcgccgcacaaaccggcccgagcccgcgcaccctgctcgatgaccttaaacgcgccacccaggccaacgacccccaagctacccgccaggccctcgacgcctgggcgcggcaacagccggaaaccctggcggatatggcggcgcggtttgtgccgctgtcggacgcgttggacgggctgaatggtgcgctgtacagcgagagtgggcatttctggctgggagaggacttgtggcgtgcggtgaaggcaattccgatggctgagcgtgaggtggatccgacggcggataccaccagcttgccgccgctgtatcccaagtagccaaggtgactacttaagataggacaggcgtggccgataaagcgatgtagctttcgattaatggagttttttaaaatggccattacgttgaatgtttcctatccgcctttaagtaagcagacagacgcttacgccatcaaaaacccgcagcaagtcacgaatgccttcactattaccgaagcctccgaggcggcggatacattgaagcttggcgatcaggagaagatcagtcaacttaaggagtttttgaaagattatgatatgacgtcaatcagtacggatgagcttaagaaagtcggtagaaggctctacgatgacggaatgatcagccaacgcgcttttgggatgttcatttcgggtgatggtgcatcagatgccaatggtcgccaaacaaacacccacgtaaaatttaatgccattgccctattcaacgagaaactggaagatacgcgggcttttttcaaaagtgaaccaatggttgcaatgcaagacggtgccatggatcacttgcaagggatggtcagcgcaaatcaagctgttggtgcattggcgtattttgtcaagtccgctaataatgatttatcgataaatgagtacgcttgaatttgatttatgagtcaaggcgcgccaggttcaacctgacgcgccgcctgctcatctagcgtccgtatctcaccgtacctgaataggatttagacgcgctggtttcgtttttcagccttacacgataggtaccgaatggccccacgtaagacgcgttagtgccgatactgaatgacactctgctccaggatgagcctacttcacgctcgataaaaatcgccggagcacttcccgctcctcccgctgaaaccgttgcatcgatattcgcggcagaacagccattggctccggttattttaaatggaccatataccgtaatctcatcattgggctgcattatcccggtataactatcagcaatattcaaacacaacgcagatgcctggaatgaaacaagcatcaatccagcaagcggcaatgcaataaggcttttcataatagtctccatcagtattaagaaaacacaaaagcgcatcacgcaaggagcgcgtcaattgaccactccacgcttgccagactgcatgaattatttatcaaagtaagccagccgcttcctaaattctggaaggaaaggcctgtcattttttagtgtaggaacaagtaaggcgcgtcctaatcctgcctcccacttataagatcggtatttaatagcattttactttgcgtttttttcagataaatattctaacccttggcacggggcggtttactcgcgaatgcggtgtgtcagatagaaatgcactgcctgacccaccgccacccggagcaagccccctcccacattgaatctgcgtcgcctgggggcagcagggtcgcattacaggtaaactcccctccttttcatctattccacggagttcgccttgcgtctgtttcacacctccgactggcacctgggccaaaacctccacggccaggaacgcgacttcgaacacgcctgtttcctcgagtggctgctgggccaactcaagacccatcagccggatgctctgctcatcgccggcgatatcttcgataccgtcaacccgccgctcaaggcccaggagcggctgtatgacttcatcatcagcgcccacgaacaaaaccccaagctgaccatcgtgatgatcgccggcaaccacgattccggctcgcgcatcgagctgccggcaccgctgatgcgccgactgcgcactcatgcgctcggccgcgtgttatggctggatgacggccagctcgacgccgaacgcctgctgatcccgctgcccgatgccaaaggcaagattgccgcctggtgcctggctttgcctttcctgcgcccggcggaagttaccggcgcgcacctgggcgacgattacctgcgcggcatcggccaggtgcatgaatggctgatcgctgcggccaatgccaagcgcaaaaaaggccaggcgctgattgccatcagccatgcacacatggccggtggttcggtgtcggaagactccgagcgcagcctgatcatcggcaatgccgaggcgctgccggccagcttgttcgataaaagtgtcggctatgtggccctcggccatttgcacaagccgcagaaggtcaatggcgaagagcgtattcgctacagcggttcgccgatcccgctgtcgttttccgaaatcggctacaagcaccagatcctcgatgtggtgttccagggccaatgcctggtgagcgtcgagcccatcctgattccgcgttcagtcgacctgcaacgcctggaagccgtgcccctggccgatatcctcaaggccctggccgagttgccggacatcgacctgctcgccgaaacccaacgccacccctggctcgaagtgcgcgtcctgctcgacgaaccgcaacccgacctgcgccagcaaatcgaagccgcgctgcaaggcaaggcagtgcgcctggtgcgcatcgccgccgagtacgccggtaaaggcccccgtgaagacgaaggcgacgaccgcctgatcgaactcgaccagctcacgccccaggaactgttcagccgcgcctggcaggacagctatggcagcgaggtagatgaacagaccttgaaggacttcgccgtgttgctccaggaagtgcagcaagagggggaacagccatgaagatcctcgccatccgcctgaaaaacctcgcttccctggccggcccattcgagatcgacttcaccgccgaacccctggccagtgcggggttgttcgcaatcaccgggccgaccggcgccggtaaaagcaccttgctcgatgccttgtgcctggcgctgtttggcgccgtgccgcgcctgggtgataccggccaggcgaagatgccggatgccgacagcgacatttccatcggtgacccacgcaccttgctgcggcgtggcaccggcggcggttatgccgaggtggattttgtcggcgtcagtggccgccgctaccgcgcgcgctgggaagccaaccgcgcccgcgacaaggccagcggcaagttgcagaacagccgccagagcctgatcgacctggacagcgaccaactgctggccagccagaaaaccgaatacaagacccagctggaactggccctgggcctgaacttcgaacagttcacccgcgccgtgttgctggcgcaaagcgagttcagtgcgtttctcaaggccaacgacaacgagcgcagcgaactgctggaaaagctcaccgacaccgcgctgtacacccagcttggccgacgcgccttcgacaaggccaaagaggcccgggacgcgcacaaacagttacaggaccaggccaccggcgtggtgccgctggccgctgaagcccgtgccgaactcgatcaacaattcgatgccgcgcagcaacacctcaggacccagcaggcccaactcaagcagctggagcttcagcacacctggctcaaggaactgcgcgaatggcaggaacgccaactcgccgccaccgagcagcttcagctggcgcaggccgagtggaataaccaggacgcgcagcgccaggacctgagccgcctggaacagttggcgccgcagcgtcatctgttcgtgcgccaggcggaactcggcacacagctggcgccgttggcggcgcagattcagtcgcatacccggcaacaagacgaactacacacccgccaggaacaggcccggcaccaacaaaccaacgcgcaaaccgccctggctgaagcgctgaacaaccaggcggatgccgcgcctttgctgcgccaggcgttcgacgaacaaagcaccctcgcgcacttgaccaaagagctggccaagcgcaccgaggacaaacagcggcacgcaagcgcctgcaccgaaggccaggcccagctcactggcctgctggaaaaacagcaccaggtcgcagagcgcctgcaacgcctgagtaccgagcttgagcgcagcgccgcccttgcgccgctaagtgatgcgtggaccgcctaccgcgaccgcctgcagcagctgatgctgatcggtaaccgcctgaacaaaggccaggccgaactgccgcaactggagcaacgtgcaagcagcgccgctgaacagttcacccagcaacgcgaagccctggacttgctgtatcaggaggccggtgccgagcctcacgccgtggccgagcagatccaattgctggccagcctgctgcaagacaatcgcaaacagcagcgagccttcgaagacctgacgcgcctgtgggacaaccagcaacagctggaccagcaagccaccagcctgacgcaaaagctcaccacggcccaacagcaacgcgaacagttgaaccagaccggcctgcacaccaaggccgagctgaccgtcgcggaacagacgctgaacgtgaccaaacagctgctggaacgccaacgcctggcccgcagtgccagcgtcgaggaattgcgcgagcagttgcaggacgaccagccctgcccggtgtgcggcagtcacgaacacccgtaccaccagcccgaagccctgctgcaaagccttggtcgtcatgacgaaaacgaggaagccaccgcgcagaacgcggtggacaccctcaaggagaaactcaccgagttgcgtggcgaagtgggcggtttgatcgcccagcagaaggaatacctgcaacaacaggaacacctggcgacgcaacagcaagcgctgaaaccgagcctggatgcacacccgctggccgcatcgttgttcaaccaagaggccgccaaacgcagcgcctggcttgagcagcaactgagccaactgacccaaagcatcagccaggacgaacagcgccaaggcgctctgctcaacctgcaacaaaatgccgggcgcctgcagcagcaactgcaagccgcccaggaggcaagccagcaggcccgccaattactggtcgaccagcaacgcgagttggccagtgaccgcgaacgccttgagcaggaactgagtgccttcgccaacctgctgcccccagacaccctggcaggtctgcgcgccgagccggccgccaccttcatgcagctggaccagcaggtcagccagcgcctggaacagctgggccaccagcgcgacgaattggccgagcaacaggaacgtcaacaggcgatcgagaaggaacagacccaccagcagcatcgccagcaacaactcgacgccctgctccagcaagtcaccgagctggcgagccaacagcaaacggctcaggaaaaactcagcgcgttgctcggtgagcacaccagcgccgaacagtggcagcaacagctggatcacgccgtcacccagtcgcgccagagcgaaaccgacaccaaccaacaactgcaggacatccacaacgcgctgatccaactggccgccgacctcaaggctcagcaggaacgcgaacaggcattgcaggccgaacagcacagcctcgacacgcgcctgcacgactggcgcgccctgcacccggaactcgacgacgccggcctcgaccgtttgctggcctacgacgacgcccaggtcagccacttgcgccagcagttacagcacagtgaaaaagccgtcgaacaggccagggtcctgctgcaggaacgtgagcaacgccttgccgagcaccaggcccaacacaatggcaacctcgcagccaatgagctggacaccgccctggccacactcaaccagcaattggccgaggccgagaaacactgcgccgaactgcgcgcgcggcagtccgaagaccagcgtcgccaggacgccaaccaggcctttgccgagcagatcgccaaggcgtatgacgaatggcaacgctgggcgcgcctgaacgcactgatcggctcggccaccggcgacaccttccgcaagatcgcccaggcctacaacctcgatctgctggtgcaccacgccaacgtgcaactgcgccaactggtacgccgttaccgcctcaagcgcggcggcagcatgctcgggctgctggtgatggacacggaaatgggcgacgaactgcgctcggtgcactcgttgtccggcggcgaaaccttcctggtgtcgttggcgttggccttgggcctggcgtcgatggcctccagcacattgaagatcgagtcgctgtttatcgatgaaggcttcggcagcctggacccggaatcgctgcaactggcgatggacgcgctggacggtttgcaggcccagggccgtaaggtggcggtgatttcccacgtgcaggaaatgcacgaacgcatcccggtacagatccaggtcaagcgccagggcaatggtttgagcacggtggaggtgaagtgagcgaagcgctgctgtattcgttccggcgctgcccgtatgcgatgcgggcgcgcctggcgttgcgttattcaggtgtgcccgtgcagatcatcgaggtgagcctcaaggccaagccggccgagatgctggcgctgtcgcccaagggcacggtgccggtactgagcgttgacggacgggtgattgaagagagcctggagatcatgcaatgggccctggcccagcacgatccggatgattggctgctgcagggtgacccggcggtactggcactgattgccgagaacgaccagggcttcaagtatcacttggatcgatacaagtacgccgaccgctacccggaacacccgatggaacactatcgggccgagggcgcggtgtttttgcagaagctggaaggcttgctggcggaacgcgcgtacttgctggcagagcatccgagcctggcggacatggccctggcgccgtttgtgcggcagtttgcccatgtggatcgggagtggtttgccgggacgccatatcaacggttacaagcctggcttcagcgcgtccttacttcaccgctatttatcgccgtgatggcaaaaccctgaggccggcacaatcaaatgtgggagggggcttgcccccgatgacggtggatcagtcagctaatctgtagctgacccactgctatcgggggcaagccccctcccacatctgatctcagtgatctaccgcttagtgctgggtcttgtgatccagtgcggcgtagaaattggcgctctgttgcaggtatttctgggtgtaggcgctggtgctggattttttgccggtcacttccacgctggctgcggcaggcagggcaacagtggcagaaacagcggaagcggcgatgatggagaagaggttcagattcatggcggtaacccttgtgttcgtttggttgagtggccggggaaggccttggaaccaaacttacgcccgagggctgaaccttagaaatgctttgaaacagtagccgctattaacagaattaatagaaagggtcaggccccgcgcggcggggcctgtggcttattgacgcaccaggaacttgaggtcgctgggcgcatcaatcggcaatttctgcacggttttacccagcaggccggtttttgggtcgcgttcgactacgacgatttcgttgcttttctgattggcgatcagcaggaaccgaccgctggggtccaggctgaattcgcgcgggtggtcaccgtccaccgagcgacgttgcaactccttgaggtgcgcggtggccgggtcgatgctgaacaccagcaactggttggccgtgccacggttgctcacgtagaggaatttgccgtcactggaggcatgcaacgcggcaccggccttgtcggacaccggctgcccggcggcgaagtccaccagttgggtctgggtcaactggccgtccttgtagtcgaacaccgccacctgcgcgctcatctcggtggtcaaccaggcgtgcttgccatcagcgctgaacaacaggtggcgcgggccgctgcctggcggcagttgcaccgaggccgggttggccggggtcaatggcagttcatggttggccttggggtcgtagcggtaggcaaacaccttgtccgcccccaggtcctgcacaaacacgtacttgccatccggcgacgacaccaccgaatgcacgtggttcgacgcctgccgctcagggttcacgcgactggccgggtgcccactcagttgcaccggaggcgacagcttgcccgtggcgtcgaccggcagcaccgccaggctgccgcccgggtcttccaccaccgaatagttggcgaccaataggtagcgcccatcggcggccacgctggaatgggtcggctcattgcccaggctctgcacctggttgaccagggtcagttggtgagtctgcggatcgatgctgtagctgcttacgcgcccgaccgggtctttctgcccgggaccgttctcgttgaccacaaacaggtgcttctggtccttggagatcgtcagccaggacgggttggccgctttggccgcgagcaccggtttaccgctgaattggccagtacggctgtcaaattgcaggcgatagatgccttcgctgctgccggcggtgtagctgcccaccaacagttcataggtgtcggccggcgcagcttgcaccgacatcgcgcccacgctgccggccatcagcagcggccagaatttacgcatcatcatccgcttcatcctcgtcgttattgttgccggtgaaggcgcgcatgcagatcaggcggtgctcgcccgaatcaccggtaagggtccagctttgcaaggtgtcatcgaacgtcgcggcgtttacctgttccaggctgaagcgccagcgtttttctgcacggccgtccatggcggtgatcagcaatttttctttatcgagttggaaatcgaaggcatgcagcccatcgatttcaagcatgtcgctggtttcaaggacggcaggcaaattctcagtcatcacagtctttcatcaggttcaaagcgctaatcataggccagtttgctgccggggcctaaaaccatagcgggctaccgcatgctggcaacgccgggcattaccttgcaaggacgcattcttatccgacgtaaaggaattcccatgcccgcacagcccaataccccagcggcaaaccccacacgacaagcggttgaagcgcagtttctcgggcgcccgacgttgcgcaccgtcaccgcgcaaatgctgggcacccacctggtggaaaagtacccgcccctgacgctgcccgtcaccgatcttcggctggccgtaccccgcgaaggcggtggccgagtcttgctgcctttgctggacgtcgcgctgaaccatatcgccgacggcagttttcccgaattgacggcacgccagaacctggattgctacctgagcgatgcaaccggcactcggctcagctatcaggtcaacggagatcgtcgcgacttcgacctgcgggtcatcgaggccatccttcgggagctacctcacgtactgttcatcggttttcaagaagcactggccgcgtattggggacaagacagtgacgcagggggcagccgctggaagtggctggccgatgtgctgcagggcgtgttgctcgacgtcgccacgcgccagaccagcgtcacggcgcaacaccttgaaattctcaacgccttgaaccgctatccagaccgggcaacccgtgcgctcggccccgcccccgcgaacgaggtccacgcctacaccctggaaacgcatttgcagcgctcgggcaagcggctcaccttccaggccaccgagatcctggtggttcgcgcagagcaggtgttgttgtatcgcttatccggtgaggttgagccctaccccgacctggacaccttcggccaggcatggggcaaacacgtgcaacagcgtttcactgccgaccagatcacctggcagcagtatgagccggacgggaatatttttgaggtacaggccgcgcttatccttaaccagcaactggacgatctcgccgccctccaactcccggcccaaacgacggtacaagcgctggaagagctgtttgcggtgaccaccgatcccgcgcagtggctggcccaatccagcgccacgccgctggcaaccctggcatccatccaggcagccctgccagccactctgcaagacgccagcgcggccaaccggatggcctaccgccaaaacctgctggaacacgccaacatcaagcgccaggtcctcggcgactcagacttcgatagcctggaaaccctgcgcggttatgccaccgcgcatttgaaccaacagttgtgcatggaccgcgccgttgcccacggctggcagcgtgcctgcacccttgaggcgctgtctgccggctaccaggccgacgatctggaactgacctttcatgtgccggtgggcaccctcgaagggggttacattgaaccggtcgtcatgagcctggttgacctggcgctgaagaacctgtccggccgccccaagggccgcatgaccgtgcgccaccgcacgggccgcgagatcgaaacgtggttgacgcccgactacctgcttaaactggtccagcgtgttgatatcggcaaaaactatcccgcctacctgcgccgagagctgatgggggatacccaggccgcgcgtaaacgccaacagctgttcgagcaactacggcccattcatttaaagacccacgcgctggagtgcttgatcaatggccaggcgggcctgactcaacgcggctttcactgtgtcaatgcactggtaaaccctaacccgctggaacgtcgggttggtgacgacgaaattgtgatccgcccgctggcctttgtacgtaaaccaggcgccacggccgatgtcgtgcgcaacatgttcatcattgaaccgcgcaatacacaatcaggcccgcacttgctgtatcgcccggcctatcccgatgcattgttggagtacgccaaccgcgaccaactgctggccgccatcgcgcaaccgggtaccctgcaggacagtgtcctgacctggatgactgacaacgccagaggcatctacagccacggtggcttcacccagcctcactctgtacgcgtgggtatcggttcggagttcgatagcctgcccagcgtgcccaagcccgcagagctgacgcgcgccgacgacgaatgcaacgacgaactgcttcaggcgctcaacagtggcagcctcatggaatacctgttcggcagtgaaacccgacaactgttggatcaggctgaacaagcgtccacatccaacagcgaaagccgctgggcactgatcctggaaggcctgcaactggggttcaacacactactgctggtcgtgcgtggtcccttggcggcaatcggctggctgatgcaggccacacaaagcctggtgaaagacctgccggcactggaaagtgacgatccgaccgccagggagctggcgtgggttgatctgctgctcaatgtcggcatgctgctgttgcatcacggatcgctcagcgcaccccgcgaaacgcctttgcgcgctgaacgcgccacgactcccgcgccgttccaacgacgctggcctggccaatcaatcggtcgatcggctgtggttgaacggggggctgtcgggctgccttccgaaccgcccggtggtggccgcaccttgttggactttgaccgctcattggcgggcgacggcgcatcggccaggcttttgcagaagctgctggccgtcaacgtgccctggccaacccccattcccgagccggtttcccttgggatgtatcgcggcttgtactcgatcaaccgccaatggcatgcctcgctgggcggcctgctattcagggtcagcatcgtgccgggttttggcgaggtcttcattattcatcctctgaagccggaacacccgggcatccagctgaaaaccgacggccgcggccattggacgctggaccgggggctcaagctgctggggggtggacgcaagcgagtgcaagagctgcgcaatgaaaagcagcttgagaatgaaaggttgcaggcgcgcacgctccaactcgttcaggaagcgcagctcctcacggcgccgatcgatcaagcaggcgcccagttgccacccgccctcaaaagcctggagaaacaactcaagaccctgcaaatcattcaggatctgctgcttaaagcttccgatacacaacgcccgagcctggaagtacgccaacagactgaagtccaggaatacaagcgcctgcgcaatcagttcgaaacgctgctgcaaaacgtcgaaacccaactttcccaagccttgcccgtgcgcttcgagctagccaccttgacccgtcaactagaggccgccgcgattgctgacctgcccctgatcaatccatcaaccatcctgaaagaggtctggaatcaacagttgtttctgcacaagatgcaattggaagcgttgggattccataccgcgaccgaagcgggcgaacccttggaggcgtggaacaaacgcatgcagccacgaatagtggcgggagacttggccctcgtcgacgaaaacctgcggatggtcacgggttatatcgattacctcgaacacatggccgtgcattccgccacgatggaagccacccttgagtaccttgggcaagggtcgggggccgcgcgggcagtgcgtcaagaactgctggcaagcattccagtggttgaattgtttttctccgacaacctgaaactcagtgctttggaactgctgaccggcctgagccagctacgcttcaagatgcattcacaactttctgcgttgcagtggtattacaaggcccgttatcaagtgtccgggctggacataagcctgaaatcccacctcgaggtacgtagcagctccgagtacccactggacgagcaacgcaatgtctacgagaccgtcctcgacaaataccagcatgccgaattcgccctccaagccctcaagagcctcaaatccgacgctttaggcccggaagccgagcgtgtgctcaaaggccttgaatacgccaaggcgttggcgcaaaacgaactggaatcggtggttagagagcaggaagacctcaaggtcgaactgccgttatccaaaaccctgcgcgccaagcctgcggcaaagcgcgtgttcaagacccgtaaaaaggaatacctgatcggcgaactcaagcccgccgacgcgcaaaatgcccaggagcacatcaccatctccgacacattgctgggtaaaaccctggcttcgtataaccagcagacggatggctgggtctccatcgacgaggaagccagccctgtgccggccccacaggctcgctcactcgcggcgctcaaaagtgaagcccaggccttgattgaacagcgccaggacctggaacaactggtcgcggcggaccaggcgaagctggactcccccctcacccgccaggacgccaaccccggcgaatgggataagttgctcaacacccaagccaacaaactgaccgagctcgccaacgaaataaaacgcgaccatttcaacgcgcctaccgcccagaatctgatcgatgaatgcctggcacaggccaaggacatcaatcgctgggcacaacgtatctgcagcgaagcctacaaacgccagtggccgacaatggaaagcgtcgcttacctctgggaccaccagcagatcgatatcaacctcaccagccaggccgatccgcaacgcccgaccctcagtggcgacttcttcaccgaatacgcggtgtacgacaaggcgcaaaagccaccggtggtgctgtggtacgcgcacttccactatgctgccgctgacgctccacccgcgaattacacccgggcgcatctgaagttgccggagcaacgcaaactcacccagaaggatttgctcaaggcccatgtgcaggattatctgagccgtgtgaaggaccccgacaacgcaccggtgaccaaaattgtctatgtgctgatcaccccgccactggacaacctgttcctgaagatagcgcccaagcccaacgttcagtaaaccactggatgagaacctgttcctgaaacggtaacccgcaaaaaagccgcacactgtgcggctttttcaaaacgcgacgactcagtgcgcaaacaacgagttgcccttctgccccgccaacttctccggcttgatcaggaaccgcgccagcgccggcagcagccacaacgcaccgaacatgttccacaacagcatgaaggtcagcatcaggcccatgtcggcctggaacttgatggccgagaagatccaggtgcacacgccgatcgccagacacaggccggtgaacagcacggctttaccggtggacttgagggtctggtaataggcttcttgcaacggcaaaccggcacgcaggaagctttccaggcggctgtagatgtagatgccgtagtccacgccaatccccacgccaagggccaccaccggcaaggtcgcgaccttgacgccgatacccatgaacgccatcagcgcgttgcccagcaccgaggtcagcaccagcggcagcacgatgcacagcgtcgcggcccaggagcggaaggtgatcatgcacatggtcgccacgcacaggtacaccaggatcaggatggtcagttccgactccttgatcacttcgttggtggccgcttcgatcccggcgttaccggcggcgaggatgaattccaggccgtccctgttgttctccttggcaaagtcctgcactgcatgcaccgcacggtcgagggtttcggccttgtggtcattgaggaacaccagcaccggcgccagcgagcaattgttgttgtacaggccatcggcacgggcgatggagttgttcagcacatccgggttgcgcgacagggtttcccatttcaggttgccttcgttcatgcccttgatcatctgcttggacacggtcaccagcgagatcgccgactgcacaccttcggtgttctgcatcttccacatcaactggtcgatgggcgccatggcttcatagcgcgagcagccttcggccttggtcttgaccatcaccaccagcacgtcggaactggtggagtagttgctgatgatgaagttgttgtccttgttgtagcgcgagtccgggcgcagctccggcgcaccctggtcaaggtcgccgatcttcaggttctggctgtaccagaggccgccaccaaaggcgacaagcgccagggcgatggagatcggcgcgactttcgggttggcaaaattcgacagcaggcgccagaacgaatgttcgcgattcgcgtctttcttgctcttggcgatggcacgcttgctgatgccgacataggagatggccaccggcagcaggatcaggttggtgaacacgatcaccgccacgccgatggacgcgccaatcgccagttcgcggatcacaccgatgtcgatgatcaacagcgtgatgaagcccacggcgtcggccaggatggcgatcatccccggcaggaacagttgccggaaggtgcgccgggcggcggtcagggcgttgtccgcctcgctggactgcagcgcgatgccgttgatcttctgcacgccgtgggagatcccgatggcgaagatcaggaacggcaccagcatcgaatacggatcaaggccgaaaccgaagaagtgcatcaaccccagctgccagatcaccgccaccagcgtagtgctcaacacggcgacggtgctgcgcaggcagttggtgaaccacagcagcaggatcagggtgataacgaacgcgatgccgaagaacatcaccaccatgaccaggccgtcgatcaggtcaccgaccttcttggcgaagccgacgatgtggatcttgacgttggggttctgggcttcgaacttatcgcggatcttgtcttccagttcgtgggagaacttgcggtagtccagggccagtaacttgccctggtcctgcgggtccgggtaggactccagcagcggaatgtcgacgatgctcgacttgaaatcgttggccaccaggcgccctacctggccggacttgagcacgttgttgcgcagttgatcgagactttccggcgagccgttgtagctctgcgggatcacttcaccgccggcaaagccttcttcggtcacttcggtccagcgtacgctggggctccacagcgacttgagccccgaacggtcgacgccagagatgtagaacacctcgtcgttgatctgccgcagggtctccatgtactccttggtaaaaatgtcaccgtccttggcctccaccgagatgcgcaccgtgttgcccaggttggccaggtcgttacggtgttccatcatcttttcgatgaaggggtgcttgagggggatcatcttctcgaagctggtggacgggcgaatcaaagtcgcctgccagaacaggaaaatactcaccagcaggcagatgacgatcactgctggccggttgttgaagatcaggcgctcaagaaaggttgctttatcgttgtgatgactgctcattctttccccgcccttattattgttttacgagttcggcgccgttgggcgcggcgacgcgaacgccaccctgccccgccagaatcaagttgccgttgcctgccgccgtgacggacgacagcgaaatccggtccggacggttgaacacgctgaaggtcagaccatcgtcatggctgaccaccacgctgccaccgttgcccaccacgacgatggagccgtcatccagcaaggtcgcgcccgacaaaccaaactccagcgctccccgcgccgcgttcaattcgaccggctcccaggtgctgccaaaatccgtggagcggtacaggttgccacgcaagccataggccagcagcgtctgcggctgggcggtgccgatcacgccgaacagcgagccctcgtaggggccttcgagcttttcccaggtctggccgtcgtcgctggagcggaacatgctgccctgctcgccgacgatgaacaggccggcatccttgatgtgcgcgatggcgttgaggtggtactggtcttcgttgtcaaggcggtcgctgacgtcattccaggtcttgccgccatcggtggtttcgatcaacgcaccgtaggcgcccacggccaggccgtggttcgcgtcgttgaaccacacatcgagtaaaggtgcttcgcgcttgaggtcctggtattgctgggtccaggtggcgccgccgtcggcgctggcgaggatctgcgcatcatggccgaccgcccagccttgcttgtcatcgacaaaaaacaccgccgtgagcaattgccgggtggggactttggcttgggtccaggtgctgccctggtcgtcggaatagaggatgtgcccgcgatcaccgaccgccaccaggcgcttgcccgcgtggaccacgtcgatcatcaggcccttggcggccttgggggattcaatcgcaaacaccggcgttgcggcggtatcgctggcggccagtaccggtgtggacaacgcaccaccgaccagcaacgagagcgctgtggccagcatcgcaaccctgcgtgcggcgcgtgggcggcagacaacccaacccattacaggctcactcatagacctttctcccatttattattgttatcgcttgccttccggggccttgaaacctgcaatctagagcgcctggaggaagcaggggccatcctatcgggctttcgaatcgtctgacaatcggcgctacgttatcttttgttaactgaaggcatttggccccatggtgaatgtagctgcattcgccggggtgatcgccagcgcgcaaatgaatttttattccatctattgaattttaggaatttttattccattaatagccttcctgaaaacaataatccaaaggaccacggcgatgcgtgaactcggaatcggcttgatcggcacaggcttcatgggccgcgcccatgcattggcattcaataacgcccgtgcggtattcgaactgccggtacccctcaagctggccgccctggctgatgccgacagcgaacgcgcccagcgctgcgccaccgcctggggatttgcccaggcccatggcgactggcaggcgctgatcaatgacccgagcgtcgatgtggtagccatcaccacccccaaccatttgcactaccccatggccatggccgcgattgctgcgggcaaagcggtgtactgcgaaaaacccctggccgtcagcctggaacaggcggacgccatgcgcctcgccgccagtgccgccggggtggtgacgcgggtcggctacaactaccagcacaacccgatgatcacgctggcgcggcagatgattgccagcggcgacctcggcgaaatcatcagtttccagggcgagttcagcgaggacttcatggccgacccgacctccccgtggtcatggcgctgtgaggtcgaacatgcggggggcgccctggcggacctgggcagtcatttgttgtcgatggcccgttatctggtgggggatgtgacgagcgtatgtgccgacacccagaccgtccacggccagcgccctgccatcaacggcagcaccgagctgaaatccatcgccgtggatgaccaggtgcatgccctgctgcgtttcgccaacggtgcacgtggcacggtcagcagcagttggctcaagcacggctacaagaaccacctgagtttcgagatcagcggcacgaaaggcaccctggccttcgatcaggaacgcttgaatgaattgcaggtatgccgtattggccaggacggcttccagcgtttgctcgccggccccgccctgccaggttacgcggcgttcagcccggcggcggggcatcagttggggtacaacgaactgaagacgctggaggtgcaggagttgatgctggcgctcgcaggccagggtgcggatggcaccgactttgaggccgcgtgggaagtggagcggttggcgacggcaattcgcgtggcggccaaagaagaacgctgggtacacgtcgaagaagtttaacagccccgaaccttgtggtgagcgagcttgcctcgcgcggggcaagcccgctcactacaaaaagcaaagtctagcgcaaggcccggcgcaggactttgccgacggtggtcttgggcagctcagtagtacggaactccacgtacttgggcaccttgtaccccgtcaggtactcccggcaatgcgccagaatctgctcctgcgtgaggttcgggtccttgcgcaccacgatgatcttcaccttctccccggtcacgccatcttccacgccaatcgccgccacttcacccacgcctgggtgcagcgccaccacatcctcgatttcattggggtacacgttgaaacccgaaaccaggatcatgtctttcttgcggtccaccaggcggatatagccgcgctcgtccatcacaccgatatcgccggtcgatagccacccctcggcatccagcacctcggcggtcgcctccgggcgtttccagtagccctgcatcacctgcggcccgcgcacttgcaactcgccctgctcgccgatatcagccagctcgccgtcttcgcgcatgaagcgcacccaggtcgacggcaagggcacgccgatgctgccggtgaactccatctcacgcatgcgcgcaatgttgatcgggctgatgctcaccaccggcgaacactcggtgaggccgtagccctcgatgatcggcagcccggtgacttccttccaacgcttggccaccgccgtgtgggtggccatgccgccggcgatcaccatgcgcaggtcggaaaagtcccgcgcacagaactccttgttctccagcaagccgttgaacaaggtgttgaccccggcaatgccgttgaaacgctccttgcgcaggatcatctgcacccgtttcacgtcccgtgggttggcgatcaggatgttgcgcccgcccaggcacatgaacatcaggcaattcaccgtcagggaaaagatgtggtacagcggcagcaaggtgacgttggtttcctgcttgtcctggtccagttggtcacccacccacgccttggcttgcaacaggttggcgatgatattgcggtggctgagcatcacgcccttggcgtcgccggtggtgccgccggtgtattgcaaaaaggccaggtcgtccagatgcatccccactgggaaatggttgagtgcccgcccctgtttcagcacctggttgaagcgcaccgaaccgcgcaggttgaacgccggcacctgcttttgcacacggcgcaggatgaagttcatcgccgcgcccttgaaggtgccgagcaggtcaccgatggcggcgatcaccacgcgcttgacgctgctgccggtgatgactttttccagggtgtgggcgaagttctcgaagatcaccacggtttccgcgccgctgtccttgagcagatgcttgagctcatgggcggtgtacagcgggttgacgttgaccaccacggcgccggccaggatcgtgcccagcaggcagatcgggtactgcaagcagttgggcatcatcagcgccacgcgatcgccctgcttgacgccctgtgcctgcagccaggccgcaaaggcgtacccttgcacctgccagtcggcataggtcatttcggtgccgatactgacgtaggccacccgctcgcgaaacttctccaggtgctccaggaatacctcgcgcaacgacggatagtcctcgatacccgcatcgatatccgccgggacgccaggcaggtaagcgttcaaccagatccgttcggtgtgttccaggcttacagcgttcatggcagtctccttgttgttgtttttgatagagctacttttcgacgatggcggtaatgcccagcccgcccgccgcgcagatcgaaatcagcccgcgcccgccaccgttctcatggatgatcttagccagcgccgccaattgccggccaccggtggccgcgaacgggtggccgcaaccgagtgagccaccgttgacgttcattttggcgcggtcgatggcccccagcggtgcctccaggcctaggcgctcgcggcagtaatcggcgtcttcccaggccttgagcgtgcacagcacctgggcggcgaaggcttcgtggatctcgaagaaatcaaagtcattgaagctcaagccttcgcgctggagcatgcgcggcactgcgtaggccggggccatcaacaggccttcgctgccgtcgacgaagttcaccgcggcggtctcgccggtacgcaggtaggccagcaccggccagccgtgttcggcggcccacgcctcgctggccaacaacaccaccgaggcgccatcggtcagtggtgtggaattgcccgccgtgagcgtgccgtcctggcggtcgtaggccggggccagcccggcgagtttctccaggctggcgtcggcgcgcaggttgttgtccttcgccagtccgcgatgggggctgatcaggtcgtcgaagaagccgcgcttgtaggccgcttccaggcgttggtggctggtgagggtcaattcatcctgggccaggcgcttgatctgccagcgcttggccattgcttcgcagtgctcgcccatggacaagccggtgcgtggctcgccattgcgcggcagcaacggcttgaaaaacatcgatgggcgaaccttgagcaacgtcttcaacttggcgcccatgcccttggcgcggttggcggcgagcaaggtgtggcgcagggattcgttgatgccgatgggtgcgtcggaggtggtgtcggaaccgccggcaatgcccacctcgatctggcccagggcgatcttgttcgccaccagcaaggccgcttccaggccggtgccgcaggcttgctgcacgtcgtaggcgggcgtgtccggcgacaaggtggtggagagcagcgactcgcgcgccaggttgaaatcccgcgagtgtttgatcactgccccggcggcaaactcaccgaggcgctggccgtgcagattgtaacggtcgaccaggccctgcaaggcagccaccagcaggtcctggttgctgtcgtgggcgtacaccgtgttggagcgggcaaacgggatgcggttgccgccgataatcgccacgcggcgggtcggcggcgggttgaagctgtagtcactcatcgaacgctctcattccaaatgaataggccgcgcatatggggtttgtcgccggcgaagttgcgcacttcgaattcacggcgcgggccggtcacggggtggttccacagcgctacctggccgggcaggaagatcggcagcttgaagtcgcaatgggcctcggcctggtccagcccgccgggtggttgctgggcggcgagcgctcggcccagggtccacatgccatgggcgatggcacggcgaaagccaaagagtttcgcgccgatcacggaggtgtgaatcgggttgaaatcccccgacaccttggcaaaacgccggcccaggtcggcgggtaacacccagcgctgggtgcacaacaaaccctcctcctgcaatggcaacacgtcgtcccatggctggccgaccgggtccttgacgtcccggcgcaggtacaggctgtcgctctcccagaccagagtgtcggcaccgtaggcacgggtggcgatgctcagcgcctggcctttgggatgggcgacccaacgctcggcatacacctccaggcgcaaggcctggcccgggtgcaggcgctggtgctggcgaatgcgattggccaggtgcaccatgccgctggccgggtacgggaagcttgggcgcgtcagcagcatcaggtgcagcgggaacgccagcacatggggataggacaacggcacgccctgctcacggcgaaacccacaggcacggccataggcctcaatgccggcgcccgacaactcggctgccgcacgcaccagacgctctttgggcagcagcggcgcaccgtcgagcgtgggtttgcgcaaggcgcgcacgccatccagcagcaagcgcgtgcgcgatggcggcgggtcgataatctgcgtcacgtagtccatggctcaggcccccagcaggctttgcccgcacacgcgtacaacctggccgttgaccccgccggacgccgggtgtgccagccaggcgatggtctcggccacgtcaatcggctgcccgccctgggacatcgagttcatgcgccgccccgcttcgcggatcatcagcgggattttcgcggtcatctgggtctcgataaacccgggcgccaccgcattcacggtgacctgctgcgccgctgcatggggtgccagcccttgcaccaggccaatcacaccggccttggaggtggcgtaattgctctggccgaggttgccggcgatgccggagatcgacgacacgcacacgatgcgcccaccgggattgagcccctggttgccgagcaacgcctgactgagttgcaacggtgcttcgaggttgaccgccagcacgctgcgccacgctgcttcgggcattttcgcgatggttttgtcacgggtgatcccggcgttgtgcaccaccacatcaaacgcgccgtattgactggtgtgggcctgcaacaacgcggcggcatccggggcggtgatgtccagcggcaacgcggacccgccaacgctggtagcggcttgctgcaaggcttcttgcgcctggggcacgtccacgcacaccacatgcgcaccgtctcgggcaagcacctgggcaatcgccaggccaatgccacgggaggcaccggtgaccagggcgcggcggccggcgaagggtttgtcccagttgacggtgacgtggccgtctaccggttgttccaggcgcaccacttgcccggacacataggccgagcggcgcgacaggaagaaacgcaagctgctgtccagtgcttcttcggcacccggcgccacgtagatcaattgcacggtgatcgcccggcgcagctctttggccaacgagcgcaccagcccttcaagggcgcgctgggcgatggcctggggcaagtcctggcaatgttccggcgcagtgccgagcaccaccacacggccatggtggccgatgcgtttggcgttggcgtggaagaattcatacagctcgtccagctgttgcagatcggccacggcgctggcgtcaaacactgcgccctgcaccttgaccgtggacggcgccttgggcgtggccggggtggcgatcactgtgtcggtggccgcgaacacacgctgcacttcagcggccagacgccctgccccggcaacgatcaccggattgaccaggccatgctggccgctgcgatggcgttgcagcggcagcggttgcggtaaacccacggcctgggccaggcgacggccccagggggaattgacgaacgaaaggtagctgtcactcatagatagatccactcaccacacatacttgccgtgtaaacccggtctgtgtgggagggggcttgcccccgatagcactctatcagtcaacgattcattggctgaaccaccgctatcgggggcaagccccctcccacattgattgggttttttcctaattgactgaggcgttttcactttggctggcgcgacgtttcgtggtcggctccagcgcctgtttgcgctgttgcaatgcttccaacaagccgaagtcctgcggaaagtcgtccacctggataccgtgatcggcgtattccacataacgcccgagcaaggtgtcttcgtcgtcgctgatcaggtccagtgcccgtgccttgacgcgccaggtcgtgaacgccgtggcggagatcggcattggctcgatcaggccctgcttgacggcggacttgagtcgggcctcgatcagctccacttgcggcaacagacggaaacccagttcgccataggccagcttgtcgatttccggacgtgggatgtaggaattggccagcagacggtcgcgggtttcccccggcgtctgcaccacatcggccacctgggccagcaggcggtcggacggcttgcgcaatgggataccgaaggggaacgtcaatgcctttagcacggatgcagcggctttcgacgggtaattgtcgagcacttcggccaacgcttcatgggcacgcagcaacgcatcctgggccgcccagtgcaccagcggcaaatccgcctggggccggccgtcatcctcaaagcgcttgagcacgcaggacaggatgtacagctgcgacagaatatcccccaggcgcccggtgatactttccttgcgcttgagggcaccgcccagcacgcccatggagatatccgagaccaacgccagcaccaccgacagacgattggcctggcggtagtaggacgccagcgcggggtcggtcttggccggcgcagaaatcagccgaccgcctgtcagggaatgcaccactgcgcgtacggtgttggccaatacaaagctcacatggccgaacatggcactgtcgaatgcctccagcgccttgcgccggtccgggttgcgcgccgcttccatctcgcggaacacatagggatggcaacggatcaggccctggccaaagataatcaggcagcgcgtcatgatgttcgcgccttccaccgtaatggcgatggggctttgctgataggcgcgggccaggaagttgttcggccccatgcagatgcctttgccggcgacgatgtccatgccgtcattgacgatgatccgcgcccgttcggtaacgtggtacttggcaatggccgagatcaccgaaggtttctctcccgcatccagggacgctaccgacaccttgcgcaccgcatcgcaggcatacaggtgcccggccatccgcgccaggggcgcttgcacgccttcgaacttgccgatgggcaggccgaattgtttacgcatcgccgcatacgcggtcgtgccgcgcaccgcgaccttgcccaggccgacgttggccgatggcagcgaaatcgcccgtccggctgccaggcattccatcaacatgcgccagccgttgccgacttgttcgcgcccgccgatcacccattccaaggggatgaacacgtccttgccggtggtaggaccgttctggaacacggcgttgagtggccaatgccggcggccgctgttgacgcctgggtgagacgttggaatcagtgcgcaggtgatgccaagggaacccggagcgccgagcaggccgtccggatcttctgcgcgaaacgccaggccgagcaccgtggcgatcgggccgagggtgatgtagcgcttgtcccaggtcacccggaagccgagcacttcctcgccttcatgcatccctttgcaaacgatgcccaggtcgggaatcgccccggcatcggagccggcatacgggctggtcagggcaaagcacgggatgtcttccccccgcgccaggcgcggcaggtagtaattgcgctgggcatcggtgccatagtgcagcagcagttcggccgggcccaaggagttgggcaccatcaccgaaatcgccgccgccgagcagcgcgtcgacagcttcatcaccacctgcgaatgcgcatagtgggagaagcctttgccaccgtactgcttgggaatgatcatgccgaggaacccggcgtccttggtgtattgccagccttcaggagacatgtcctgccacacctgagtggtttcccaatcgttggcgatgtcgcacagggtctccacttcgttgtcgaggaaggcctgctcttcggcgctcaggctggcgggcgcggcttgcagcaggcgctgccaatcgggcttgccgctgaacagctcggcgtcccaccacacggtgccggactcgatcgcggcgcgctcggtgtcggacatagcgggcatgattgtacgaaacaaacccagagccttgctggtgagcaaggtgcggcgcaggggtttgatggtcatcagcactgcgggcaacaccaccagcagcgccgcaacgccaatgccgaaaccggccacagcgttgaacaggtaaccggccgccagccagatcaagccagcgcccagccagtgaatggcagcggcttgtcgatacgccagggcaatcgcagcggcgacacccaccaataaccagataaacatggggatacctctactcgattcagggtatggcaaaagcgcttgcaggtcgcactgacctcaggcgtaaggccacactacaaactcggagaaaaacattcaatttttgttttgaaatttttatttaatgcttggacgaataaacaacggctgaacaggtcagccttacagagtcgcgattgagttgaagcggtacgggtcgcctgcgcgacccatcaacgccaggccagactcaaacggcacgggagatgcgctccctgccgctcgtctatgggccctgcgctcacaatgaatcagaacgcgtaagtcgccgaaaggctgacaacttcacccttcgcgtcggctttgccatcgagagtggccccacccaaacgatcctggttgtgggtcctcagcttggctttctcgacgaattgccgcgagtaagccccatcgatactcaaaccaggaatagcacggatgttgtagccaaacccgagggaagcaaatatacgatcaccgtccggaatacgtgggtcacgtgtggagtttcgtgttggggtctggtcggtggctacaccggcacggaaagtgaagtcgtcggtgaatttatagtcaccgcccagcgaaaccatccaagcgtttttataattgtagggaattgacacaatttgcgcgccgtcagacttcaatgtcagtgccttgaacgacgaccattgagtccaggtaacgctggcgcccaacgtcagacggtcattgaactgatgcacccaatcgacagaggcatttgccggcacatccagttgcgcggaggcattggcgccattggagttgaggttgagccccggatacgcgagtgcaggcaggccaccatcgatcagcgctttgttcgcgtcgtcggcgtaaatgctgtacttaccctctagcttgttttttatcttggcgtggtagttcaaacccagggtgtcgaattcggttggcttccagaccacaccggcaaaccagccaacggaggtgttatccaccttgacccgcatcaaagaagaacccacaccggaagggaacggaattccgatggcaggtgacaacgccgctgctgcatataagtcgatgttctggctgacaaaccctttggtgtgctgaacaattgcaccggcgcccaaagagaactggtcattaaccttgaacgataacgaacccgtgactccgacggtttcaatacgcgtatcgaccgcaaaatcccggccgatccagtcctggtcccaggttgtacgtgcacccatcggcactacctggcttaaaccgaaagcaaaacggtcgttgataggcatcaccatgaagccggtgggcaaccacgcggtaaagccgccttgtccaccatcaccggtgcgtggcgtggagcttaaatcagtggggtctacggcggctggcgcattgcctgcgtaatccttggccgtccccttgtatttgatattaatccgtgcgtaatcgacggtgaactgagaaacgttgtgatcgatgaaagccatggccgccgggttgttgtaagccgcagacgggtcattctggaacaacgatccccccccgaaggctctcccccagccaggagcaccgaaagtcggcgtggaaaacccgccagcctgcgcctgaccggttgcagtcatgaggctgcctagaatcgccagactcaataatgtgcgcgcctgttgttttttattgttcatgccctgttccttattatttttctcatgttcggcgttcaaacctgtcccacgtcagcgggcgccttttgcaaggcgcccgccttaacgtgtgatcatcacgtttacagccagaagcacgttatcaaggggtcacagtgaaggccgggcttggattgacagccagggttttgatgctgcaggcacccacagtttgtgcagccggaatactcagcgtattggtcgcgttgttccaagtgacggcgatgtttgcagtgccacagttcgaaacaatcttgaagctcacaccttccacaaccccagtgaagttgttggtgctacccgccacgggcacgatgtttttcagcgtccaaggcaagttctgcataaccggtacaccacacaacgcgttagagccgctgacgctcgcaccagtgatggcagcagtggtgccatcagccgctaccgtaccggtaaacgtgatgttgcaaggcacggcaattcccagcgaagcaggtgaagccaccgaaatcggaccgcttgcagtgaagccgccagtcggcgcgatagtggccgcgctggccattgaagcggcaccaacgcagagggcgaacgaagttgcacaaacgagggttttcaagcttttcattgtttttcctcacatgttaaggcgaagtcatttcgccaggggtaatggccatgatcgagaggtcacggtgaaactgcagaacttccctttccagccaaatctcaattcaattaccgctgcaacatccgacggttattcaacaactttgaagttcggcggcatcttgatcgacaccgtcttgatcttgcagtcttcgccaatcggcacattggcggcttccaacttgccggtggcgttatcccaagtgccatcggccgttgaaggtccgcactttccgcccaggccaaatgcatgcacatccacgctgatcttcgacatggaaccgctcttggtgtctttggcgactaacacccatggcaagttgatggcttccacgcggctgcacttgaggccgccgtcgaattcaactttgtcgacattcaccgaggagccatcggccgcaactttgccggccactttgatggtgcagtcggcgctgatcagcgcgcccttggagaagctgatggggccttgggcggtaaaggcgctgcccgccggttcgatgcgcgcagcctgggcctggtgatacgcgatcaggcccagcgcggccaatacgatgtgggtggtgaacttggcaggtgattgcatggtgtacgtccttccctttaattatttttgttcgggtcaaaccactgtgttgcaactgattttgtaaaccttgggcgaagttagcctgcgcggcacgcaggccccgagtacgccaacaaccggttagttgaacttaaaacggtttggcgctgttactgtacttctccaggtacttcaaccgttgtgagggctgaagattggtcagggagatatccccggcataatgattcagcacgcgatggtccatgcgccgccgccacaagtacggcacataggcccagacaatcatgctcgcgtagccatagggcagttgcggtgattcatcaaagtggcgcaacgactgataactacgggtcgggttggcatggtgatcagagtgccgttgaagttggaacagaaagatattggtaacaatacggttgctgttccatgaatgccgtggcgagcaacgttcataacgaccattgggcaacttctggcgtttaaggccgtagtgctccacatagttcacgacttccagcaacgagaagccgtagatgccctggataatcaggaacggaatcactgccgcgcccagccaggcgatcatcgcgccccacagcaccacgctgtacatccaggcgctgagcacaccgttctgccagtgccaggccggcaaaccgagtttgcgcaggcgttcgcgctccaggttccacgccgagcgtgcactgaaccacaccgagcgtggcaggaacgcccagaagctctcgcccaaccgcgaactggcggggtcttccggcgtcgcgacacgcacgtgatggccacggttgtgttcggtgtagaagtgcccgtagaaagtcggtgccagggtgaccttggccaggaacacttccagcgcgttgggcttgtgccccagctcatgcgccgtgttgatcgcgatgccggtggcggcgccggtcgacatggccatgcccaggtaagtgaaccagctcggttcgccatgcagttgcgtgcgtgcagtgatgtaactcgcagcgtgagacagccagctggacggctccaggttcgcggcagcctgcaacaggccgccctggatgatccagtcgataccgcccgcggcgagccagccggtgatcaccaccgacgagatcacaaacagcacgccggtgtagacgatccagcgatagtagctttgggattcgaggtggctgacggcggattcgggcgggttgctcacgtcttcaccgagcaagccatcgatcaacgggatcagaccgaagatcaccagtacaccgacccaccagagttgctggataccggtgctgatggccagtgcgccggagagcaacggggtggccaggggcatgatgcccagccaccacaggtgacgtttgccgtcggtccagatgcttggggctgccagggtctgattcatggcagcctccgtggcagggaggcaggaaacaggttcagggagcgctgaaggctccaggaaatcaaccatgcgataaaagacgtttttttcatttttattcgctcttaggcatttcaaaaatcatttcaaaataaacattgaaatatttttttaaagaaatagcgcggaatcgttaggtcgtcaactactttttcgaggccttttttgcgtgaccgtgcagtctctttttcagctgtttggtcaggtctctagggcaagcatttcggacagtcaaacccgcaacgagggccacgattatttgttcgccaaggcaaatggcggatgcaggatcgcggcggtctgtgctggccgcgcccgcttggccaactgctggactgcctcgaccacccgttcggtggcggtgatcggcagcatatgcccgcgcccttccactacttgcagcttcaggcccggcaccttgtcggccagggcctggccgtgcttgcgaaagtccaggaccttgtcccgtgcgccgtagatcaggctgatgggcagcgtcagttgcgggtagcgcttgaccatgtccggcaggtcgtcgttgaccagagcgatctcgctggaggctgcatagaagttgtcaggacgcatgcccagcagcccgccgccacgggtggcgaagtcgtccggggcactgtccggtgcgaacacgcccttgaccaccgagcggcgcgtcaacaggcccatgggaaccgtcaaggtgcgcgacacccagcgcctgagccaggcaggtcgcacagccagtgaccagaacaccagtggcaaggtcggttgagggtgcgtcaggggcgccaccagtatcagcccggacaccgcatggggatggtcgagggccagcgccagggaaatcgccccaccaagggaatgccccagcaccagcggtttatccaggcccagcgtattgataaacgccgccacctgccgtgcctgggctggcaagtccgcaggagtgcctttatgacgggtggaatagcccgaccctggtcggtcgaggctgatcacgcgaaaatgctcgcgcaactggccggacaaggcatacgtcaggttgcgactgctgcccatcagcccgtgaatcatcaccagcggcgggcctttgccttcctcgtaataatgaaagcgctcgccgtccacctccagaaagcgcccgttgatcggaacggcggcttcgatacgccgcgtcatccatgtactgaacccccacaaaacggcgctcgcgcctataaacacagccgcagcgacaacccattcaacagccatagctcggtcctctgcatccctgctgccggcgacctgaccggaattgatcaaggcctcggccatcgtccacaccctggacccgaactgcgtgcctgtccgtcggacaagtggcacatgagagacctgggactagcgtaggcgatattttcaggtagattatttaaaatcttttttaaaataagtaattcaatttttctttgcaatggtgttctatctaaaagacaaaacaagaaaggagcacatccgatgcccacgagggactgcttatgaatgcccagagtgattcaatcgacatcgccatcatcggctccggcttcgccggcctgtgcatggcgatcaagctcaaggaggccgggttcaccgacttctttattgccgaacaggccgacaccctcggcggcacctggcgggacaaccactacccgggctgcgcctgcgatgtgcagtcccatgtgtattcgttttcctttgcacccaacccggcctggacacggcagttcgcgccgcaggcggagatccgtgcgtacctggagcaatgcgccacgcgctttgggttggggccttacctgcgtttcggcatgggcttgcagcgcgcggtgttcgatgagcacctgcaacgctggcaattgaacttcagcgatggccgccaggtcagcgcgcgggtgctggtgtcaggcatgggcggcctgtcgcgcccggcgttaccggatattccgggtctggacagcttcaagggcaagcgcttccactcccagcagtgggaccacgactattccttgaaaggcaaacgcgtagcggtgatcggcaccggcgccagtgccattcagttcgtgccgcagatcgcgccgcaagtggcccatatggacctgtttcagcgcacgccaccgtggatcatgcccaagcccgaccgggcgattacgcctttggagcgctggctgttcaagcacctgcccttcactcagcgcctggtgcgcggtgctttttactgggcgctggaaggccgtgtagtgggctttgccctgcacccacggctgatgaaaatggtgcagaaaatcgccctgcgtcacctgcacaaacaagtggcgcgcccgtctctgcgcaagaccctgaccccggactacaccatcggctgcaagcgcgtactgatttccaacgactactaccccgccttgtcgcgcagcaatgtcgaggtggtcaccgatcacgtgctgcgcatcgaagccgacggtgtgatcaccgccgacggcatcaagcacccggccgattgcctgatcttcggcaccggtttccaggccaccgatcccctgccccgcgactgcatcatcgggcgtggcggtgtggacctgatggacacctggaaagacggcgcccatgcctacaagggcaccacggtgcctggctatcccaacctgttcctgatcgtcggccccaacaccggcctggggcataactcgatgatcctgatgatcgaagcccaggtgacctacatcctcgatgcgctccagcacatgcagcggcagcgcatcgctacggtggacgtcaaagcggccgtggaaagcgcctacaaccaacagctgcaagccaagctcaagcgcaccatctggaataccggtgggtgccagagctggtacctcgacccgcgcaccggcaagaacaccaccctgtggcctggctcgacctggcgcttcaagcaggtcacccgccagtttgcgctgaaggattacgtggccgacctgctgccggtgaacacgcccagccgccccgtgccggcaccccactccaccccggaaggcagtctgtcatgaagtcattcaatggccgcgtagcggcaattaccggcgccgcatccggcatgggccgcgccctggcattggccctggcgcgtgaaggttgccacctggcgctggcggataaaaacagccagggactggaacagaccctggcgctgatcaagacctcgaccctggccccggtgtcggtcactacccaggtgctggacgtgtccgatcgccaggccatggaggactgggccgcacgctgcgcggccgatcacggccaggtcaacctggtgttcaacaatgccggggtggccctgtcaagcacggtggagggcgtggactatgccgacctggaatggatcgtcggtatcaatttttggggcgtggtgcatggcaccaaagcattcctgccgcacctgaaagcctcgggcgacggccatgtgatcaacacgtccagcgtattcggcctgttcgcccagcccggcatgagcggctacaacgccaccaagtttgcggtgcgcggctttaccgaatccctgcgccaggaactggacctgcaacgctgcggcgtgtcagccacctgcgtgcaccccggtggcatccgcaccgacatctgccgcagcagccgtatcgacgcgaacatgacgggtttcctgatccacagcgaacagcaggcccgcgctgacttcgaaaagctgttcatcaccgatgccgaccaggccgccaaggtaatcctgcgtggcgtgcgcaacaacaagcgccgcgtgctcatcggccgcgacgcgtattgcctcgacctgctcgcccgttgcctgccggccgcctatcaggccctggtggtgttcgccagcaagcgcatggcgcccaagccgcgtacgccggtatttgaaaccaatgacgaaccccgtctctgaacaggagcacgcactatgttgccgatccgccgtgacatccatttcgccctgcccgccgagcgcatcaaggactggcatgaacagggcccgttcatcacgcatttcttcaatgccctgtcgctgctgtttccccagggcgagctgtttttcatggacagcgtgcgccactaccgccagcacatcgacgaccctgctcttaaaaaagagatccagggtttcatcggccaggaggccatgcacagccgtgaacacgtggcctacaacgacttgctgcaagccgccgggctgcctgcgcatacactcgaccggcgcctcaaattcatcctcgacctgcagaaaaagcacctgccaccgtccttcaacctggcggtcaccattgcccttgagcactacacggcgatgctggctgaaatcctgttgagcgacccttcacgcttcggcaattcactcaagggctatcagcagatgtggtattggcacgccctggaagaaaccgagcacaaggccgtggccttcgatgtgtggaaccgcgtgatcaaacccggccccaagcgctacctgttgcgcaccggcaccatgctcaccactacggtgttcttctggctggtggtgttcgactttcacctgcgcttgctgattgccgaccgcaagtcgggtgggcacctgaggggtttctggcgcatgttgaagtttttgtatgggcacaaaggtgttttcccacgaatgctggtgccgtggctgcactacttcaaacccggttttcacccctgggaccacgacaatcgggcgcgcctggccgggatcgatggcctggtcgaggagatcgagcaggcccagcgcgggtattaagcctgcgccaaggcggcgcgttcacgtacaaacccttgcaactgatcgcccggcagcgccttgctgaaataccagccctggataatcaattcggcgccggtattcaggaaggccaactgctcggcagtctcgacgccttccaccaccacgcccaggttcagcgcctcacagaagcgcagcatgccggtcatcacctgggcgcccttggggtcgtgctgggccaccacgaagctgcggtcgatcttgatgaagtccaccgggaactggtgcaggtaactcagggccgagaagccagtgccgaagtcgtcgatatacaccttggcaccgatagcctgcagcttctggatggtctggcgcgtgacctggatatcactgaccagcgcgtcttcggtgatctctaccgatacgtgcccatgggcctgggccaggatctccaccaggcgttcgccataggcggcgtcggtcagggtcgcgctggaaatattgatggtcatcggcagggcaaaaccgagtttctgccacttctggtactggcgaactgcctgggacgccacccacacatccacatccggcatcaaccgtgcctgggccagccattgcaggaattcccacggcgaatgcaccgtgccctgggcgtcgcgggcacgcatcagcgcttcacacccggtgcacaggccggtacgggtcgagacctgcggttggaattcgaggtagaactcatagtcgctgatctgctggatgcggctcagctccaaggcctggcgcgccagggtcttgtgggaggcgagtaccgggtccagctcgcgcaggcggcccttttcttcaaggccacggaaggtcatgtccagggacttgaggtacaccgtgcccccttcgctggcctggcgatggatcgcccgcacatacggcgcgtacaccagagtgcccaggcccagcagcgccacttgcagtgccaccgcagccaggtcgccgtgggtactcagataggcattgagcagcaccggcgcggtgaacggcacactgaccaccgccggcgacacccagcccatctgtaccaccgtcaatgccagcatggcattcaacgccgggacgatcagaaacggtatgaacaaacgcgggttgaggatgatcggcaagccgaacagcagcacctcactgacgttgaacagtgacagcggcagactcgccaccgccaacaggcgcatggactggctcttggagaacagcaggatggccagcaacaggcacaatgcaccgcccgagccaccgataaacgcaaagctgcccaacaggccactgttcaacacatatttgagcggctcacccgccgcctgggccgtgctgttcagcaccacggcctggtccagcacatcgaacagcggttgcatcgcgtacacaccgtgtatgccgaaaaaccacagcagcgaattcatcagcgtcacgaacagaccgctgccgtagggcgattccagcgcgtcgaggacctgggggccttgtaactgcgccacatacggaatctgcagcaacaaggacagcaccaccaccagtgccagggcggtgatagcgcctggcagcaccatattaatggtgccccgcaggttgtgccccaccaggtcttcgttgaccagacgggtccagcggtagcggtgcagccaggcaatggcaggaacattcaacagtggcgaggcaatggcgataaacagcacaaaggtggccgaggcccggggataatcgcgcagaataaatgttgccaccaccacatgggccaggcacaggaatgccacgggcaattgcggcaggcgatgctggatcgccagcatgtaaccgatggacgcggccaccagcaacgggatcacggaactgatctggttgtgcaggccggcgaggaacgccaccacctgggggtcaaagccaaggacgcgagcacattccgacagaatcagaaagcccgccgagaccagcaggcaaggcaggatccacaacaacccttcgcggatcgcccgcagcgattcagtgctggccaacgcggccaggcgttgggtgaagaaaagcttgaacagcgtttgcgccatgacccatccctctgcccatcgcccactgtccctgcagggcagggctggaagcaccggctaacgctacacgtcctggcccaatcagcgaaagccttttgccattcatctgggtgaattttccgtatcggataacaggccaatcgccgaatctgcttcaatgaagcctatccgcctccccctgacctgtgtttggagtaagcctttgtcacaacccggtgataaccaccagcgcgcgctggacaaattccttgaagaacaccccgaagtcgccgccgaactggataccctgaatccgctggctgcgcaggccaggggcgaaaccctggtccagtaccgcgccgaacgcttgcatgaagcctttgaagcgcaagctgaacgccagggcctgtttgcctgggagctaaccctcaaactgaccgccgactcctgcgaggcctttgaagcccagcgcctcgaagtgcacaaggaggtggcgcagatggctggcctgagctgggtcgagtactgccaactgcacgacctgccccgctaacgcactaccccaggaaccagagacggcgcctgccccccagcacttcgcgcaactcggcgaccgacaccgttcgttgttcaggatccatcgccagtgccgaacacacagcgggccagcaatgcctgggcagttgcctcggcctcggcagcggctgatgctgctgacgttcgccggggcgcctcccttcggccagttcatagagcacgctggcaaccccgtataaatccgcacgggctgacggaagcccgccggccatcagctccggtgccgcatacgcaggggtccaggcattcaggcgactgcggctcaagccgggcaatcctgcccttgcctgcgcttcagcatggcccaggccaaaatcgaacaagcgtaccccctgctcccccaccatgatgttcgccggtttcacatcgccatgcaggaccccttgtcgatgggtgtacgccagtgcatccagaagttgcacggcgatgggttgcaacgctggccacgccaacccttgcgggcattccgggagcaggcggtccagggtcaggccgggcatcacttccatggtgaagaatgccaactggtgcgctgtgtcgacctcgaaagaaaaggcccggaccacgtgttcatggcgcaggcttcgggtcagggcgaactcgctgtacagcaacacgtgggcgtcggtggacgcacagagcgtctctcccaacagcttcagcgccacgcgcgcgtccggttcgccaaacgcctcatgtagcagatcccgggcacgatagaccacccccatgccccctgaaccgagcattcgctccagctggtagcgccccgcaagcaggttcggcgggccgacagcggcgttcatggctgcaccaccaccgcagtgaggtcatcctgtgcgggcccacgtagcacgtcgctgaacaaccgctccaccacctgccctggcgtgccggcattcatcgcgcgccccagttcccggtggctgagcccttggtacaggccatcactgcacagcaagaacacatcgcctgggtggggacgcagttccagtatctccagactcagcggttttcccgcgccaatggcacgagtcaaggcgcgggcgtctggatgagcgcgggccagttccaggctcaaatgctgcttgtccatcagttgctgttgcagggagtggtccctggacagctgatacaaacgctgccctcgccagagataacatcggctgtcccctgcccagatgcacgccgcgcggtcacgctcaagcaacagcacaaccaccgtactgcccatgatgcctgaggggccatcggccgcctgcaactggctgtcgagcccgcgcaggcagcgttggacggcctcgacccgttggtcgaagctgccttgccctggcagcgccgccagactgctgattaccctttgactggccacattcccagcatgatgcccacccattccatcggcgaccgcccagcaaccgcgttgcgggcaatcgaggaacccatcctcgttacgcgcacgacgcttgccttgcgccgtacggccggcacttcgccaagggtgcgcgcggttcacaattgctccggcaggcgaaagccgcgccatgtagccatctggaacgggctggggctgcgttggctggtgagcaggtagttggcacgcaggccggccaggtcggccttgagtatctgtgcatccctgccgctggccggctcgttttgcatcaattcgaaaagccggaacaacgaccaggccccctggtctttttcaatgcccagcggtcgctccgtaccgcgctccagtaccaggctgctgcgcccattgtccgcatcaatcggccaatggaacgccatcggcacgatggggccgtgacggtattccaattgctgatcgcccacccgcagcgtcgcccggttgacggcctggtccaggctgtagggcgccagcgtgaacagaacggtccaatccccctggtctgcgctgaagaacccttggcgaatcacctgcgcccgggtcagttggtcgagcaacgagcgtgaaacaggcaggctgcggccctcaaggccccgcaaacgatagcggctcccctcgacactgacgaacggccgcaggtagctgtcatagaagtgctccatcaccccccgtggtttaaagaacgactggaaatcacccagggcaacatcgctgccggcatcggcattgaaggggtagcggtgccggatcgccttcacataaaaaccatacacctcactgtgataacgctggttcacatacccataggcgtcatccagcagatggcgccaggtttgctcggcaatcccgtccaaccagcccttgagcggctgcggcaggcgagcagcagcgtcacgcaggttgcccagcagcggctgctgtccatccatgcgttgcctggccatcttgaatgcggcctgctcgggcgaactgtcacggttcagtgtcgagacttgcaggtgcagctcatccagcaagcgcaaggcctgggtcagctcggcggtcgggttctgctcttcatccagcaataggtgcaaaggctcgaaacgacgcagtaaagcgcgccgggcagtatccggcagcgtttggcgcggcaaggctcgggtgagcaagccggacaccggcgcgcccaactcagcgacctgctggctcaccgcttcaagccgctcatgggtcggcagcaatcgcgtgtgttcacgcacctgccgcaacagcaacaccagcgccgactgggcggaagtgaagttcgcgagctgctgcgcatcgtgcctcaggtcgtcgctttccagtagcctgactcgacccagcgcatcactccagatgtcggcgtactcgctgaagtaacgctgttccagctccagcatcagcttgcgcaagtccacgacgctgaggtctgcggcctcgccaagcacccagttatcctgggcgatggcattgaccaactgtggcccctggctttcgaaaaactgcaggtatttacgcgtatagaaacccgggatgggcggctcaaccctggaaaacgcggggttttcagcgaggcgcaagggttccaggtgccgcgcttgctcgcgcagtgtccggtagaccacctctgccattggctcaccgcgcagcaccaggcgggcatgggcgaccaactcatcattcagcggggccaaaaaaccctgttcaacgagccgtgcaacatgttcgttcaggcgtttgtgtgtcgatgcatcctcgatgtacccaacagtccgcagccccgccacttgctcggccaaccaggccttatcacgtcgctcgggcagattgagcatcaggtaagcgcgcaggctgtcgagcaactgctcgcgatcacccaggctgtcacgtacctgttgttcgagccgtagggtcacgtagggcagcaattgctgatgcagggcttgttcgtaggcgctgctcaataacggccgactcatctcgccctgatacaagccgccccgctcaacccaaggtactttggccgccggtggaaacacccctgtggccgccaggcgactgtccaacagtgcgagcaacgccaggctggcgtccgcttcgggttggcctacggacttggggttgatcagctcccgcagttgcaccagccgctgatggttgaacgcgtaactgtgcgcccacagcgccccggcagcacccacaaccaatgaggcggccagcgccatcaacccgtggcgtcgacggatgcgctgccgctccggggcacgcaacccggcaagaccggcctcggcaaaaatcacccgattgaacaggccctgggcaaaatgggcacgcacatcatctgtcttcgcgcaggtcaggtagaacccgcgcaagccgttgattcgctggtagcgatgggcggcaaacgcactctcgataaacaggcagacaaactcgcccaggcgcgcaagatgctgaggaaaacccagcatgcggcctcggcgctcaaggttgcgttcctgatgcaagcgcgggatcagctcggccgccacgcgttgcaacaaggcgtcgaatgtttcgcgtacctcggcgacttccatgcctgccgcagccgccaccaggcgctcacccagccagtcttctgtggcgtcgccctgccgcgcatcaaagaactcggcaaacccggccaaccgatcaagctgggtcagcaccagatacaccggcacatccacctgcagtgactgctgaatgtcctgcaagcggttacgcacatggcgcgcgtgacgctccaggtcgtgttcgttgctgcgcaacagcgtaccgacggacagcgtcaccaccacgccatcgagcggccgtgccctgcgccatgacttgagcatgtccagcattgtcgaccatcctgctgcatcgacactttggtcgggttggctcaggtatcgacctgccatctcgaccaccaccgcatcgtctgcaaaataccagtcacagtacgaggtggcgcctggctgcatcgggtgcgtccggtcgagcgccgtcggcaacccggcagcggccagcaagtcggtcttgccgctgccctgctcgccgatcaacaggtaccagggcaattcctggcgcgaacgctcactgcgctcgccgtagcgctgcgcggttttcaacgtctgcagcgcttccttgaagcgcccccgcacctgcgccacttcgtcattgatcaacccctgctgctgaagatgttcacgctgcccaggctgatccaaacgcgcggagcgacgtgctcccaccaccaccatcgccaatccccataacagcagcattgcgctgatggtcaacaaccgggccgtcgaaccctgccagaaacggtagtcgtctaccgccagcaacggcccgacgaaccacaccagcagcgcgccggccagcaccagcaacaggctccatgcccaactctcgcgcagcaccctgcccacgcgtttgaagaatgcgttcattcattgctcccagcgttacaagggcgtccgagacggctctgccagcgaagattggaaagcatgcaacgtcgccctgcgctcctgccccagcatccaggcgaaccccgaatacaccaccagcagacacgccagcacgcagactgcggcccaggcagcagagacaatgcgtatccgtgcccgagcggtcccgtcggcgtctgctacaggggttaacggcggctgatcgccgcgcacatgcctgatctggcgatacaccgcgtcgtgtacggtttcgagctgcgccctcccccgctccatgacgcggtattggccttcgaaccccaaggacaggcacaggtacatcaactccagcagggccacatgcttgacggggtcgcgggacaagcgctcgagcagttggaaaaacttttcaccgccaaaggtttcgttatggaagcggctaagcaggctggtcttcgaccagtcgctacggccaccccacggcgtagtgaccacggcttcatcaatgacactgcacagcacgtaacgcgccgacatcacctggctgttctcggcgcccagatacaaggcataggcctcgaacgcattgatgcctgaggaaaactgctcattgagtgcctgctggctttcgcgaccggggttggccttgagctggaccacttgcagcaagagttcccaagccgcggtcaacagcacattggggccactcttgaagtgccgtgtaccttgcagctgggcgcaatagatcatgcggtcttccagttgctcgaagcgtggcggcgacggaaagtccgtaacggctgcgtgcgccgggccgagaccctcacggtcaagcaacacggttttttcgtcttgcgggtattcactgtccatagtcatgacgtcagttcctgatagcccagaagttgagttccagctcggcaaactcgccgctggcgtggaaggcgaaaccacctgattgctccagctgtgcaatgtcacgggggctgagttcgagcatgaaataggtcttgccggcgtggaacggaatctgccgcggcgctaccggcaacggcttgaccttgatcccggccaggtgcaggttgaccagttcgcggatgcgctccaccggtccgatcttgagatgggccggcagtcgatgacgcagctcctcggtatcgcactgggcagtggccgccaggatgaaggtggccgtaccgagtaacttgaggtcgctcaccgggcagaccagcaccccgtactgacggggttgcagcgtcaactcgaccgcctgctgttccaacaccagcgacagcaccgtacgaaggccttccatcaacccgcgaaagctcgcgccctgatcgccatgccggtattgcaccggaaattgcgcacgtttgttgtcgttggaaaacgtgcacagctcaccgaaaatcgacagcaactcccgatacaccacctccgggcgcacctgggtctggctcaggtagtgacgcaatctcaactccgcacgattgatcaactgcagcatcaaaaagtcgccgacctgtgcgctggcggaagcgccgtttccctggatgcgagctgcaatcgcatcgccacgggtcgccagcaggctggtgatttcgttgatgcaagacgccacataccccgagccctggaggtagataaacgtcggtacaaaatccgcatccagcctcacaccaccgtcctgggtcgaatccaccacccgggcaacctggagtttcacgtagaaagggtcaccgggcggctcgcccagcatcaggcgcaagtccgggcgcgcgcatttgatctggcaacgggagtcgaccccggcagcggagtcaccgatctctgcatcacaggcgacatagcgcgccaggacatcgctttgctccttcgagcgcacctcgatctgattgtcagtcaccagcggcagcgccaggtacacagcctgcctgcctggattggcaggcacctgcaacatcaggggttccagggtgccgctcagctcgaacaggctgccgtccggtaacactccgctggcctggttcaccacaatcttgcccaggttgaggtactgcacatcgacttccaggctcaggaaaccccaggcatcactgttcaacagccgggtatggttgagttgccgatggtagtagcggtcgctgtgctgcaagtgttggggcctcagcagcatgccctcttgccagataacgttgtggatctgcatctcagtcctccgtcctgtcaggttgagttgctgccatccggatacccgtctggtccagcacgatgtcggcacgggtcaactgtccgggagccaaaggcagcacccatcgccattgcacatggggcaagtcacgataggccgccagcacgccgacatagcgactgcgcggctcgacactcagcttgagcgccagccgttcgccggggcgcagttccagctcctcgccgctgacccaatccttgggcagtgcctgctcggcccggccgtagaggctgaagaaatcagcgttttcaaaggccaccggatgccgcagttccagcaattgcaccaccacgggcgaggggcggccgtgaaggtcggggttgacctcgtcgctggccgtcaatgtcaggtccagcttggtgagggtggaaaaaggtgaaaagttgctgcatcccgccagcaaccccagcactagcagcgttgataagacagcgacccgagaccggccaatcatcctgcgtaccccgcgtgaagcgtggagaccaggcgtacctgttcctcataggccttgcaaaagtcatgacgcagcatctgctcatccaagggttcctcgtcagtcagtcgcctgtaatggcgttggtaggcccgccaatgggcgccatcgctgaagaacctgggtgcattgccgtcacgttcaaagcgcagcagcaggcgcccaggcgcaaaggctgccactgcaccgcgtacggcagcccgacaggccacgaccagagccagttgatgaacctgcaagtctcggtacgcctggtcgaccgcttgctcggcagagaactgatcggactcaccgtcgccgagcaaaaaagccagggcggcatggctgtcggcgcagtttttcaacggattgcgggtattgagcagcggaaccgccaataagccgtggacctcgctgttgagttcatcacgggttcgcaggctttgctgcaacccttcgagggtttgcctgagcaggcccgccaccttgatcgccagggcttcgcgccccggcgtatcaagcgagtccacctgcatacccaatgcgtgggcgaactgcgcccagaatgcttgcgaggttgccggtggtggcgtgacaggaccaggtgatacaacgtccctggccggctcagcccattgcggcacgaacaggtgatcgtgctccaccgtgccctgacgtaacgcttcgaccgctgcctgcggcgtggtgtccaacgcgtccagctctgctgaggaattgccgagccgtgcctcgcgatccaatgcgtcgacaggatccagccccaggaacgcgtcgtctggaatcgtgtgttgccgagcaacaaccggccctgcctgcaacaccaggcgggcacggatatccagcagcccaagttggtacacatcgccgtcactgatgagccgtgcctgtcctttgcacaggcgctccatactgcccgacacaccgataccgttgctgctgatatccgtcaggaaatagcggccctctctaaaactgaccagggcgtggtgactggaaatcagacggttggcatccgggagcacccagtcacaactcgacttacgtccgatcacgccaccgacaccgtcaaacgtcttgcgctcaggtggctccccgcttgcggtgctacagagttcaaacatcaattgcatgacagcggccccctgttcagtgcccacgacgagtcgcatgggggtcacccaacggacggtagtcggcatcatcaaagacataattggcgttacagccactcaacaaactcagcgcaagcaccagggcttgccacggatgaaaaggcatcaggtatctcccatgaaaataagcggcccgcacgttccctgctcaaccctcctcgcgggcgtcccccacggggattttcaagcgcgccaggcggtaaagcagcgtgcgccgcgcaacgcccaactcacgggcggtacgggtgcgattgccacggttcttgtgcaggcaatcgatcaggaacacccgctctacccgctccaggcgttggcgcaacgtcgcatcgactgccccagtggcagccggcaccggcaaggacaggtgtgccggcaggatcacgccgtcgtcacagagcagcaccgcacgttccaccaggcatttgagttcgcggacattgccggggaaggcgtgacccgagagttgatcaagggctgcattcgaccattccaccggcacacgcccaagggcggcagaggcttgatgcgcgaattcccgcgccaacagcaacacatcgccgtcgcgctcacgcagaggcggcagttcgatgggaaactgtgcgagcctgtagtaaaggtcctcgcgaaagccgccttgggcgaccattgcggcgaggtcacgatgggttgcggcgatgatgcgtacatccaccttgtgggccgtactggcgcccaacggacgcacttcgccctcctgcaagacccgcagcaatttagcctgcagcgacagcggcatatcaccgatttcgtcgaggagcagcgtgccgccgtcagcgctgtcaaacagcccggtgtggttacgctcagccccagtgaaagcacctttgcgataaccgaacagctcactttccagcagcccttcgggaaacgccgcacagttttgcaccacaaaggctttgctcctgcgcggccccgcagaatggatcgcccgcgccacgacctccttgcctgtaccggtctcgccacgcagcaacacggtgtagggcgtatgcagcaccttgccgatcagacgatacgtctcgtccatagccgtactgctgccgatcaacccgtacgctgaacgcggcgccggcaggcaagcctggggttgggcaacacgtgccgtggcacactgacaccgcagtaaagcgcgctgcatcaaggcaaggctgcccagttggctcaaggcggcggtgtaggcctgcaggtttttccgatgctggctggcacacagcaacacacccttgatgcccttgcctcggtcaaacaacggcacacatgccaacgcttgccagggggtcgccatgaccggcaggaaaccgtactcgtacacgctgcctgagtgtgcttccaggctgagcgcggtttgctggttcagcacatagtgcagcacctgttcatgctggaaatccttggtacaggccggatcgccagggcaaggcatgccgtgcaaatgctgggcgatcagttcaagccggccagtggattcgttgcgccagtaccattggctgaggtcacactcgctcagttgcgccgctgcggcgacacacaaaccggggagagtggctgcgtcgtccgcgctgcccaggcggatgaacccgtcaagcagcgcatcggaacaggccgccgaacggggcagcagagtgagcagccgatcctccctcattggctgaactcacaggttggaacaccgttagccgccaaccgcgcatggacctgtgacacaggttcacctcgggccatggcttgcaatcgtcgatcgaccacctgcggcaacaaatgcagctcgatccattgatcgatataacgcgcaccactgtcatcgtgggcgcaccgctcggccatgtgctcaaccagctccggcgtgtagctgaatgccaggctgcgcagactcaagcgttgtcccaggcgttcgagcttgagccttgccaagtcatgcaggacgtcatccgtgaccgggtaatacggcacgacacgcatcctggccaataacgcggctttgaagtggtcccgcaattgcggcaggatcgcctcatgcagcgtttgcacgtcaggtcgccggccgcctgcgcacaattgcccgatgcgctcactgcccaggttggacgtcatcaggatcagcgtgttgcgaaagtcgatttcccggccttccccatcattggccaggcccttgtcgaaaatctggtagaacaggttcaacacttccgggtcggccttctcgacctcatcgagcaacaccaccgaatacgggcgttggcgcacggcttccgtcaacacgccgccctcgccaaaaccgacataaccgggcggtgcgccaatcaaccgggacagggaatgtttttcctggaactccgacatgttaagggtggtgacgaagcgctcaccgccatacagcaggtcgccaagggccagcgccgtctcagtcttacccacgccactggggccgaccagcaggaatacgccgaccggcgcgtcagccttgttgagcccggcagcaaccgcacgcagattgcggtccagggcctgcaccgcttgctcctggccgagaatgcgcaggcgcaacgcatcggcaaaacccagcacccggtcactgtgctcaagtgccagttgttcaaacgggatccccgtccaggcactgatgacctgagccaccaggcgggggcacacctgctgcgtggtttgctgctgttcaagccagcgttgctcatggtccaggcgctcaccgtccagcgtctccatacgctggtccaacgcgtgcaaggtctgttcgtccacgggaaaaccttcgtcccggtctctgctcaatgcctgaagctgccgcgcgccttccgcctgttctgcataaaggtgttgcaacgcctcaggcgcggtctcgcggcgagtgcgcaaacgagcgcaggcggtatccagtacatctaccgccttgtcgggcaactgacgcccggccaggtaacgggcgctcatctgcgccgccgcgaccaccgcatcgtcccgcacgtaaacgccatgactgcgctcatacaccgggactagtccgcgcaggatcgagatcgcttgctcgacgctgggctcaccgacccgcacaggctggaaacgtcgcgccaatgccgggtctttttcgaagtatttcttgtattccgtccaggtcgtcgcagcgatggtgcgcaactcgccgcgggccagcgccggcttgagcagattggcggcatcggacgcacccgcctgcccacccgctcccaccagcgtgtgcgcttcatcgataaacaggatcatcggtttcaccgcggcgttgacctcatcgatcacacccttcaggcgtcgctcgaactcgcccttgatactggcaccggcctggagcaggcccatatccaaggtcagtacccgcacctctttgagagactcgggcacctgtgcagtggccacccgcagcgcgaggccttcgacaacggctgtcttgcccactccggcttcgccgaccaggattgggttgttcttgcgtcgacgcatgagtatgtcgatcaactggccgatctcaacgtcacgacataacaccgggtcaatacgcccttcatgggcctggcgtgtcaggtcgtgagtgaagcgctccagcagtgattcgccctggggcgcggggtgtgtacgagacgcctgactcaacacgaacgcctgcacacgctgtggatccagccggctcagaaaaacctgataggcgctgcccgcgtgctgcagcggatgacgcaagagcgccagcaacagggcgccgtgatcgacctcaatgtgtcgcagttccaaatgagcaaccatcgaagcctgttgcagccattgcaccagtgcctgggcaaacaccggattgcgtgacgcactcgcctcccccttggtttgcagcgtggcttgcagttctgcggtttcaatatcggcatccttcagcgcccgcaccagcaggccatcgtgatgttccagcagggtcaacagcaggtcttccaccagcacttcccggccgccgcgcatgacgcagcgctcggcggaacgctccaggtctcggcgggcctggggggtcaatgcctggataagttgttgcaggtccacattcatcatcctgattcatccctaataagcgttgccaggcacaatgaccacaccgtcggcgcactcatgcgccagccaactggtccagccgaggcggcagacgttgtgttcaccgatgtgcaaaggccggatctcttccttggccatgaccaggcgcacgtcatagtccaaagggtcccgcgccgtcaggcgcaccaacgaacacagcagcggatagtccgcgccggtcggcaaaaaaccatggaatcggtcccaccccagcccctgcagatgcaccctgaacttgccgttgcgatcagccacccggctgcccagcacctggtcatggccaagggtgctgttcgcggcgccaagccgatttcgctgcgactcggcgatgaccacgctgcgcaggacccactgctcgacgaacaaacgacgatgcttgaagtagtaacgcagcaccgcctcgatcaaggccgccgaatgcacccgcaggctgagcaaccccaggtagggcaacagtcgcttgccattcagttgcgtggcgctgcggacctgcggcccccttaacccgatcaacgcaaacatctgctcggagaaggcatcaccggcgcttgcctggaaacacgcccgatagcgatatttgcgccagatcggcaacatcagccgttgcagacggtggtggaacacgtcaaggaagtcccgggttgcattgccacccaattcgtcggtgcacgcctgctcaccgtaaaacgccggcaatggcgagcccgcaccacacaggcccagcacgttaagacgcaaacgcgcacgcaactggccgtgctcgataaaaaacaccacccggtcgatatcgtgaccaggaaaacccaggcccgggttggcctggaactccagcaagtcgtacagcgtgtcgtcatccagcaacggatgggcatcgcgcagacgctggatgacccgcaggaccgcctgaaacagcgagtactcgcggataacccgggtcagttgtgtcaaagcgggggctgctggcccatccgtggtggccataggtacacgtctccttgtgtgctgatgactcttagttcgtggtaagcgttgaggctggcgtacagcgcgaagaactcgttgagcaccgaggcgaacacaaacacttcgccctcccccaggaagccctggggatcgatgctcaagtcgatgcgtaacccgcgaatcggcaagccgtggagcaattggtcgaccgctgtgtggctgaccgagcgcatcgcgcctaatcgtctctcgctgaccttctgcgcctggcgatcgtgatagcgtggtagatcgtaggtttcgaggatcactttcaaggcatggatgtcagtcagtgacaggtagttgagcgacatgttgctgatcagccgccagagaaagtcccggtccagaggtggagtaaaactggctgtcggtgcgcagatattccggaacgacagcccttgcggcgtctgctcgcaagcctggttgatagcgccgacctgcaattgtcgaggcaggttgtgattggtgcacgtcagctcgatcgacagtgtttgctggtccaactccagaccgctgcccaacccgagccaggtatccagcccggtatgctgcgccgatggccgctggcgaatgctgtaactcgccggcccctgggaacgcgcggtatacccctcatgctcgaaggattcaaagggcacgtaggcctgatatcccagccctccgggatgccaacccgtgacgctgtctacggaaaatacactggcgttcccgcgtgagtactcaccagggatcagcaggtattcgtcctgttttccgtccaggcggatgggtaccgcgtcatgcttgaacaggttgacgatgggggtgcagtacagcttcacgttatccaggctgggctgtctgggttctcgccatggcctgcccaatcggaagcgcaacaccacgccgcacacctgcttgagcagttcgccaggtaatctttgcagtgcccccaacccgcccacatcgacaaacaggtacttgtcgggaaaggcaaaatactcctgcagatggcgatagccgccaaacgtattcggcggatacggaatcagcgcctgctcctcgctgaaccctaccggctgaacctgatcggcgcccagaaacagcgatatcacttgcccatccaccccgtgaatcggcatgccatcccgaccgaaaggcagcaactcgataccctccagatgacgcaacagactcaggtacaacgcctggctgatgtagcgatcccccgccagatgcagacgtaactgatcgaagtgccactcactgaagttgccttctgcactcatctccaggcgcaggctcaaacttccccgttcagcctgggcgctgtagtccagcgcactcagctgcaacggcaaaacctgagtggcgtaacaggtacgaaagcggcatcgttcgtcattgactgcggcactttcaaccggcgtatcgcgcgcgacccacacaccagggcctgagtgtttcagcggatcaaactgcaggatgctgaaggcaggcagcgggcgcatgtagttgggccagagcaactgcatcagcgaatgcgtcagctctggaagctcgtcatccaatttctggcgcaagcgcccggtgagaaacgcaaagccctccagtaaccgctctacgtccgggtcctgaccggcttccgcaagaaacggagcaagcgccggattgcgctcggagaagcgtcgaccgagctgtcgcagcgcactgagttcgctctggtagtaacggttaaaggtcatcaggcatgacctctacccgaccggaatcagagagccgcgcggtaaacaccaccggttgagcgacacccttgaccaccagggtggcttcgatagcgaaggcaagtgccagcgggtcatgatcccgtggcaacgtcatcacttttacctgcttcaagcgcggctcgtaagctcggataaatcgctcgatcaacagacgtgactgactcagcgattcatgcaggctctgattcatatcattgaggtcgggcataccgtagtccggcagtgtctgaacgctgccggcacggatactgagcattttccccagatggtgcgcgacagatgtcacgctactggcgggggttgccgccggacgctcaaggcgctcgaacaggcttcgataaccgcgcacttcctggtccttgctcattctttgtcgagcttgccgacgagggatagcgtgaaatcagcgcccatgtacttgaaatgcggtcgcacactcaggttgacgcgataccagccgggctcaccctcgacatcactgacgacgatgcgtgccgcccgcaagggccgtcgcccacgcacttcggcgctggggttttcctggtcggcgacgtactggcgaatccatttattgagttccagctccaggtcagtgcgctccttccatgaacccaattgctcacgctgaaggaccttgaggtaatgggccaggcgattgaccaccatcatgtacggcaactgggtacccaggcgataattcaactcggcttccttgccctcggggctgagcccgaagtgtttcggcttttgcaccgagctggcggaaaaaaacgccgcattgtcactgcccttgcgcatcgtcaaggcgatgaagccttcttgcgccagttcgtattcacgacggtcggacaccaacacttcggtggggatcttggtttcgatttcccccatgctctggaagtgatgcaacggcaagtcttccaccgctccaccactttgcgggccaatgatgttcgggcaccagcggaaccgcgcgaaactgtcagtcaggcgcgtggcgaaggcgtaggccgtgttgccccacaggtagtgctcgtggctgttgaccacgttttcctgataggcgaaggtcttgactggacactcaagcggatcatatggcgtacgcagcaggaatcgcggcacggtcaagccgatgtagcgcgcatcttcgctttggcgaaagctttgccatttggcaaattgcgggccttcgaaatggtccttcaggtccttgaggtcgggtaaaccggtgaaactttccaagccgaaaaacgccgggccggcagctgcgataaatggtgcatgggccatgcaggccacactggaggcgtactgcatcagctttacatcgggggcgctgggagacaggaagtagttggcgataatcgcgcccaccggctggccaccaaactgcccgtactccgcactgtagatgtgtttgtacaacccggactgggtcacttccggcgaatcttcaaaatcttccagcaggtcttgcctggagacgttcaggagttcgatcttgatgttctcgcgaaagttggtgcgatcgaccagcagttgcaagcccttccaggacgcttccagcgcctggaagtcgggatggtgcagtatctcgtccatctgcaggctgagcttggtgtcgatctcggcgatcatccggtcgaccaggcgtttcttgacgggctcgccacggttctggggcttgatcaactcttcgatgaacgccgagacaccgcgcttggcaatgtcataggcgtcgtcgtcggcgctcagtaatgtctgggcaacgatgttatcgaggatgctgtactgatcagaaggtcgtgccggcagcgaatgctgttgtgtcgtcatggggtcagtgtccttttactgaaaaatgtcaggcgtcggggctgtccagcccaagttccgccagtacccgtgcgcgggactcatcgtcggccagggtttgttcgatcgccttgcgaaagctcggggtgttgcccaacggccccttcaacgccatgagtgcctcacgcagcgccatcagcttgtgtaactcgggcacctgttccaccaggttcgccgggttgaaatccttcatggcattgatgcgtacctgaatggccaactcgtcaacgccagcctcttcctgcaaacggttgggcacgctcaacgtcaagctcaatgcctgcttggccaacacgtcatccagggtgttcttgtcgatagcgatgggcttgcgatcttcaagcttgcgcgcgtcctcacgctgggtgaaatcgcccagtaccaacagcttcaatgggagctcgacttcttcctgcgccccgccgattgcgggtttgaacgtgatattgatacgttccttgggggctaccgaaccttctttggccatggtgtctctcctttttcaagtggctcgaaagcctattcaagtaccgcttccagatcgaagaggcacagcctgcgatgggtgtcttccttgcgttcgcgcacggcatggttttgtggcagcaggtcgcagcagcggtgcaggagctgcgtcacttccagggccagctctggctcccagcgctccaggcccgtgcgttgcagttcgtggtcaagctgttcgagctggatcttcgccagctcatgcttgcccgcctgtatgcacagacgcgcttgggcgagccgccaatgaaaacgtgcgcgatcactgcgcgcagcctgcatgccttgcttgagctctcggatggcagacttgagcccgtcctggcgcagccgctgtgtcaccgtctgcaaggcgatcgcccagggctcggcttgggcatcaatgagtgctgcgggcaattcaggcctgtgcaggtgatgggcaacccgctgggagatccagtcgcgagtggctgcgtcggcaaagggtgcgccgtcgtgaaaacgaaacgcaggcaggtccggcaagcgttgcagcaacagcgcgaaggtcacttccagctcggtcatggccaggtcggcctgcaggacctccaggcattcccagagcatgcgcagaccatcgaaccagaacatcgccccggcaagactggcctcaagctcaagcaccaggtctgcgtgatggccttgtgcaaagcgctcctgataacgcttgagcttgtcgggagccggcccgcgcaatgcggtcacctgctcgttatcggcattcgggtagctggcgagtgccagccatgccagtgtccggctcaaacgcaacgcgcgcaggtcggtggcgttctggcgcagccaccaggcacagagtgggcgggcctgctcctgcaaggtacggagcaccttgtgcgcgtccttttcgctctccaccgctgcttcgggcttgcgcagttggctggcggcctgcttgacttgctcgataaccccgctcaaccccgccaccggggtatcgtcctgcgctgcccgctccaatcgctgcgccaattgcctgcgaaccggcaacagcagcggcgcatcatcccccaggtgctcggcccaaagctcgtccagacgcaccaggtgctcaagcacggcgcggaacaaaggctgctggttctgcagcgccaggccctgcgtgaacagcggctcaaggcgcaataccagccatccgaatgcggcaccgcgggtgcgcggtttttccgggtagagcaccgaccactgatgctcacagaggtagcgcaacatcccgagccccgccagcagccccgggtaggattcacgctggtgcaacgcccaggtcaaccacacagccacccgcagatccttggactggtggcgtagcaggttctcgctggtttccagcaccttgtgccagtcgggctggctgccggcatgaatcgattgtgccttggccagctcggactccagcacttcatattcactcgaaaagcgcatgtcgctaccggcaaaacttgtttgcagacagggtgatcgtgcaacttctagataataatcataccggctatccgaataaatcattttccaccatgcacaactaaaaaaccaaacaaaccaactaaccacgcaagtaatgcgtgacagtgggctatcttgagttcgcattttcctgcgaagccctcgaaccttagtcatgcccaaaacattcagcaagcgatggaattacacttagtccttttcctacaaacccagctaccaccgggaatgcgcaggattttgcgcacctaaccctgcatagtcattcaactaatcatccaacttcagcatttatcgacatttcaagatgagcaactaaatgcgcacccatgcgcaatcaaatacacgtaattaagcccagtagcagcctatcgcgctgaatatccgacctactacaacagcatcaccctgattccattggcgcctgcactttcaggcacgcttcttgttataggcatttgcccagccgaaaacttatcggttggaactacctcatcaatcagacaaggaaccccgtcatgccaacacccgcgtatctctctattaccggtgtaaaacaaggtttgatcacggcaggcacgtttacccaggactcggtaggtaacatttaccaggaaggccatgaggaccagattctggtccaggcgttttctcatcaggtgatcattccccgcgacccacagtcgggccagccaaccggccagcgggtgcataaacccctgatgatcagcaaagtgttcgataagtcctcgcccctgctcttcagcgctttgaccagcggcgaagaggtcaagtgccggctggaatggctgcgcacttcgtcggccgggacgcaggagcattacttcaccatcgaactggagggggcgaccatcgtggatatccagtcacgcatgcccaactgccaggaccccgacaacgcccatttcactcacttggaagatgtgtacttcacctatcgcaagattgtgtggactcacgaagtgtccggtacttccgggtcggatgactggcgcagcccggttgcgggttaaaccggcttgacgcgggcgcggcgccaaggaaggcgccgtttccgtaaggcaactacaccatcgccaaaggatgcttgcgttttggcgcgccgaatacccgatcgatcgcgtccaggtcgtgctcatccaacaccagcttggctgctgctgcgttgagtcgcacgtgctcgggcgtaacggccttggggatggcgatcacaccgtcctggcgcaacacccaggccagggagacctgggcgggtgtgacctcgtgacggcgggcgatctgcttgagggtggggctggacagcagttcgccgccctgggcgatcgggcagtacgccatcaagggcaagtggtgctgttgccaccagggcagcaggtcgaactcgatgccgcgttcttcgatgttgtagagcacctggttggtggcgcaggccggggaggcaagttcctgcaggtcggccacgtcgaaattggagacgccccaacgtccgatcttgcccgcttcgcgcaggcgttcgaaggcttcgaccgtttcttccagcgggtactggccgcgccagtgcagcagatacagatcaatgtagtcggtgcccaggcgctggaggctggcctcacaggcacggggcacgcccttgtggctggcattgtgcgggtagaccttgctgaccaggaacacctggtcgcggcggccacgaatggcctcgccgaccaccgtttcagcgccgccctccccgtacatttcggcggtatcgatgagggtcatgccctcgtcgatacccagttgcaacgccgcgacttccgcgcggtgctggtcggggttttcgcccatgcgccaggtgccctggccgatgacaggaacgggaacacccgccagatcaatggtatgcatgacaacctcctgatgagttcgcgaattaacagtgtggcattggccggacaaaagggttcaatcgaagtatggttagcctctgccaagtcgccaggaagtctctgcaatgctgtttgtcgtcatgctcgggggtaagcacccacgggcgaaaattgaagtgcacgatgtggtgtttgcagtggcggacacgctggaagcagcctacgcgcaactgcgcgccgattggtttggcagccccaagggcgtgcatatcgactcctggatggcggtggatggcgtcgacggctggaaggtcgaactcagccccctggcacctgccgccggcgcacaccacctgtacttcatcaacctgggcggttatgaggccaacagttttggcgaggcccaccactacctcctggtggccgcccgcaataagcaggaggccacgaacaagggcaagcaacagatgctgcgtcactggtcccaggcccataccgatgaagtactggacatcgacgactgcttgcccatcgacctggtggacggtcgctatatccacctggtgcaaggcccgcatcggccgatcatccagcagaacgactacatcgtcctggcctgaaccctacccgacagtgcatgcgcagctcatcgaatggctcacccacagcggcgctatggcccgtgcctgagccactcgggcaatccggcggaactttgccgggaaataaccgcctgaatccggtaggctcaccttttttattcaaggagttacttcccatggccaaagccaccgcccgtcacatcctcgtttccactgaagacaagtgcaacgaactcaaggcccaaatcgaaggcggcgctgatttcgcagaagtcgccaaagccaactccagctgcccatccagccgccaaggcggtgacctgggttcgttcggtccgggccagatggtcaaggaattcgacaccgtcgtgttcagcgccccggtcaacaccgtgcaaggcccggtaaaaacccagttcggctaccacctgctcgaagtcaccagccgccaggactgatcccgcctgtgctgatgcaataaacaacggcccgccttttggtgggccgttgtgcatgtgatgactggcgacgctgatgccgttagcgtacaaatcccttttcttcttcatacggcgttcaaggctgacaatgcgattggctttttcttacttctttagctcgtccctggcactgctgctggccagcactgccgtgatcgcggcgcctcaaccgtacctgacggtgtatggcgaaccggccaagtaccctgccggctttacccatttcgactacgccaaccccaacgcccccaagggtggcagcctgcgccgctcggccatcgagatcgggcgcttcgaccatgtgttgccgtatatcgacaaaggcatcggggtgtcccaggtcgacggctggctctacgcgcccctggcccagcgctccctcgacgagccctacacggtctacggcctggtcgctgaaaaaatggagcgcgccgacgacggcctgtcgctacgctttttcctcaaccccaaggcgcgctttgccgatggcaagccgatcaccgccgaggacgtgcgctacagcttcgacctgctgatgacccagggcagcttgcgctttcgcaccctgttcgccgacgtcaagcacgtcgaagtcgaaggcgagcgccaggtgcgtttcgatttctccagcaatgaaaaccgcacactgcccctggatatcgccaccctgcctgtcttccctgagcattggtggaagacccgtgactttgccaatggcggcggctatgaagccccgttgggcagcggcccctataaagtcagcaagatcgactccggcagcaccatcacctttacccgcgacgcgagctggtggggcaaggacttgcccgtcagccgcggcctgtacaacttcgatcacctgagcctggagtatttcggcgacaccgaagtggcccgccaggtattgcgcggcggcgcctacgatttcaaccgggagttttccgccactgggtactccattggctacaacggcccggccctggatgatggtcgcctgcaacgcgcgcacctggccagggagatgccgcaaccggcccagggttacgtgttcaacgtacaaaaaccgatattcaaggaccgccgcgtgcgccaggccctggcgatgctgtgggattttgaatgggccaaccggcaaatgatgcggaacatgtacatccgccagcagagttacttctccaacagcccgctggccgccagccagccgccaacaaaagaagagctagcgattcttgaacccttgcgcggccaggtccccgacgaggtgttcacccaggtgttcaaggcgccggtcactgacggcagcggtgtgatccgcgacaagcagctgcaagccctggccttgctggaggaagccggctggaaaccagagggtgacaaattggtgaacgccgaaggcgaaccactggaattcacgttcctcaacactcagaacggcctcgaacgtctgttgttaccgtacaaacgtaacctggcgcaaatcggtattaccctgaatatccgccgtatcgactcctcgcaatacgtcaatcggatcatggccagggactacgacatgatcgtcatcggtttccccgtcaccacgtcaccgggcatggagctgtacaactatttcggctcggcggccgcctacgatccaggcgccaacaactacgcagtactcaaggaccccgccgtcgacagcctgatcaagggcctggtcaaggccgatacccaggcgcagatgctcacctacgcccacgcgctggaccgggtgctgcaatggaactacctgtggatccccaattactacccgcccggcacgtccgccgcgtggtggaaccgtttcggccgcccggccatcgaggcaaagaacgacgaagccctggaaacctggtgggaaatcagccccacgccgctgacgaatgaacaaatgaacgctgagctgaaaaaacgcggaggtgcgcgctgatgtttgcctatatcgtgcgacgcctgctgctgatcatcccgacgctggtgatcatcctgctggtgaatttcgtgatcgtacaggccgcccccggcggtccggtggagcaagccatcgcccacctgcaagggatcggcggcggtggcgtcggcggttcctccggcgaaggcatcagcggtggctcccgcgccagccggggcctggacccgaagctgatcgctgacatcgagaaacagtacggcttcgacaagcccgcgccggagcgcctgtggctgatgctcaagagctacgcccaactggacttcggcaacagcttctttcgcggcaagacggtgatcgacctgatcctggaaaaaatgcccgtgaccatttccctcggcctgtgggccacgctgatcacctacctggtatcgatccccctggggatccgcaaggcagtgcgccacggcagcagttttgatgtgtggagcagcaccgcaattgtcatcggctatgccatgccggcgttcctgttcgcgatgttcctgatcgtggtgtttgccggtggcacttcgctgaactggttcccggtacgcggactggtgtcggagaacttcgaagagctgagcaccgtgggcaagatcgccgattacttctggcacctggtattgccggttacttcactggtgatcggcgggtttgccacgctgaccatcctcaccaaaaactcgttcctcaatgaaatcacgcgccagtacgtggtgactgcccgcgccaaaggcttgagcgaacgacgcgtgctctacgggcatgtgttccgcaacgcgatgctgctggtgatctccggaattccccaggcctttattgccgtgttctttgccggttcgctgctgatcgaggtgatcttctccctcgacggcctgggccgcatgagctacgaggcggctgtgtcccgggactacccggtggtgttcggttcgctgttcatcttcaccttgttcggcctcttgataaaactcatcggtgacctctgctacaccctggtggacccgcgtatcgacttcgccgcgaggaacgcctgatgcttaatctgtctcccgtggcgcgtcggcgtttcgagcggttcaagaaaaaccgtcgcggctggtggtcgctgtggctgtttatcggtctgtttatcctgacactgggcggcgagttgatcgccaatgacaaacccttggtgctgagtttcaagaacgagctgtatttcccggtgttcaagcgctacaccgagcaacagttcggcggccagttgccgttccaggccgattaccgcagtgactacgtgcgaaagctgatcgagcaggacggcggctggatgctgttcccgccgattccgttcagcgacgacacgcccaactacgagctgacccgccctgcccccagcccgccctcggcggtgaactggctgggcaccgatgaccagtcgcgggatgtgctggcgcgggtgatctttggcgcgcgcgtgtcgatcctgtttgccctggcgctcaccgcgatcagcgcggccatcggtattgccgccggtgcgttgcagggctattacggcggctgggtggacctgatcggccagcgtgtgctggaagtgtggtccgggttgccggtgctgtacctgctgatcatcctgtcgggttttgtagagccgaatttctggtggctgctggggatcatggcgctgttttcctggctggccctggtggacgtggtgcgcgccgagttcctgcgcgggcgcaacctggaatacgtcaaggccgcacgggccctgggcctgggcgatggcaagatcatccgccggcatatcctgcccaacgccatgacggcgaccttgagttacctgccgtttatcctgaccggtgcgatttctacgctgagcgccctggatttcctcggtttcggcatgccggcaggcagcgcgtcgctgggtgagctaatcgctcagggcaagcagaacctgcaagcgccgtggctgggcctgaccgcgtttttcaccctggcgctgatcctgtcgctgctggtctttatcggcgaggcattgcgtgatgccttcgacccacgctcatgagtgactgcctatgaacctgatcgaaatccgcgacctcagcgtcgcgttcagcggccagaccgtggtgcgcaacctgtgcctggatgtgcgccccggcgagtgcctggcactggtaggcgagtcgggctcgggcaagtcggtgacggcccactcgatcctgcaactgctgcccgaggccggcactaaaaccaccggttccatcaagtaccgtggccaggaactggtcggcgcttcgaccgccaatttgcagaagctgcgcggcaaccgcattgccatgatcttccaggagccaatgacctcgctcaacccgctgcacagcatcgaaaagcagatcggcgaaaccctgctgctgcacaagggcttgggcggcaaggcggcgcaggcgcgcatcctcgaattgctcgaactggtgggcatccagaagcctcaggagcggctcaaagcctatccgcaccagctctccggtggccagcgccagcgggtgatgatcgccatggccctggcctgcgagccggaactgctgatcgccgacgaacccaccacagcgctggacgtaaccgtgcagcgcaagatcctgctgctgctcaagtccttgcaacaacgtctgggcatgtccctgctgctgatcagccacgacctcaacctggtgcgcagcattgcccagcgcgtatgcgtgatgcgagccggcgagatcgtcgagcaggccgactgccagacactgttcaacgcgcctcaacacccctacagccgcctgctgctggatgcagaaccggccggcgatgcactgtgcagcgatgcacgcgagacggtgttgcaggtggatgacctgaccgtgcaattcccccttggcggcgggttgttccggcgcaaaacgtatttacgtgcggtggatggcatcagcctgagcgtgcagcgcggcaagaccctggggattgtcggcgagtccggctcgggcaagtccaccctgggccaggcgatcctgcgactgctggactccagcggcagcatccgcttccagggtgaagccctcgacccgctgaaccaccagcagatgcgcccgtggcgcaagcaaatgcaggtggtgttccaggacccttacggcagcctcagcccacgcatgaccgtggagcagatcatcagcgaaggcctggaggttcacgcaccgtgcagcctggccgaccgcgatgcgcaggtggtgcaggtgctcaaggacgtgggcctcgatcccgccagccgccatcgctacccccacgaattttccggcggccagcgccaacgcatcgccatcgcccgcgccctggtgctcaaaccggcgctgatgttgctcgacgaaccgacctcagccctcgaccgcactgtgcagaaacaagtggtggcgttgctgcgtgagttgcaggagaaatacggcctgacctacctgtttatcagccatgacctggcggtggtgcgtgcgatggcccacgacatgattgtggtcaaggacggcaaggtggtggaggccggcgtgagccatcaggtgtttgatgctccgcagcatccgtacaccaaggaattgctggcggccgcctgcgggctgtcgtcatgagtaccagcctgacggattaccaacaggttcgcggcctggccatccagtcgctgttcgagatcatcgagcagtccagcgaaggcacggtgattgtcgaccgcgacgccaatatcgtgtggatgaacgagcgctacgccaggcgttttggcctcaaaagcgccgacgaagccatcggccagccgtgcgagcaggtgatttccaacagcttgctgcgccaggtggtacgcaatgaccagcccatattgctggacatccaggacacgcccaaaggcccgttggtggtgatgcgcttgccgatccacaacgacgccggcgcggtgatcggtgcgatcggctttgccttgtttgatgagctgcgcaacctgtcgccgctgatcgaacgctacctgagcatgcagcaggagttggcgtcgacgcgctccctgctgcgttcgcggcagagcaaatacaacttcgcgcattttatcggcaccagcgccgccagcctcgaagtgaaacgccgcgcgcggcgcagtgccagcgctgaatcgccggtgttactgctgggcgaaaccggtaccggcaaggagttgttggcccaggcgattcacggcgcctccacccgtgcgcacaaggcgtttgtcagcgtcaacagcgcggcgattccggctgacctgctcgaagccgagttcttcggcaccgcaccgggcgcgtttaccggcgccgaccgcaaaggccgccccggtaaattccagattgcccagggcggcacgctgttcctcgacgaaatcggcgacatgcccctgcccttgcaaagcaaactgctgcgggtgttgcaggaaaaggaattcgaaccggtcggttccaacgagatgctgcacagcgatgtacgggtgatcgccgccacgtccatggacttggaggcggcgatcaagcgcggcgaattccgcgcggatttgtattaccggctgaatgtgctgccgatccaggtgccgccgttgcgtgagcggcttgaagatattccggcgttgagcgaggcgattctggaggaactgcgcagccagcatgagctggaccgtgaagccctggcgttgctggcccagcatgcgtggccagggaatatccgcgaactgcgcaacgtacttgagcgggcggcgttgttgagtgatgaccttgtgttgaatgccggggagattcgcgccgcgatcggcaccttcacccccgtggcgcgtggcagtgccgtcgcgacggtcgagggtgaaagcttcagtgcggcgcgggagcggtttgatcggcagatcatcgcggcggcattgagcgcgtgcgaggggaatgtggtggaagcggccaagcgactggggcttgggcggtcgacgctgtacaagaagatggtggcgttgggcatcgactgatctcaaaatggagacacagctctcaatatagagataacccaatgtgagagggggcttgcccccgatggcagtgtgtcagtcaactcataggtgactgaagtaccgctatcgggggcaagccccctcccacattggtttatcatttgtctcaagctagagacaatattcggaacatccaaccacaacctataaattattcataaatttcaataagttaagaacatggcacatatctcgctatagccctctcctaaagcaacaccccacaaaaataacaatccgatggagacacaccatgagtgtgatcattgccctggcagccctcgcgctgctgatgctggctgcctaccgtggctatagcgttatcctgtttgcccccattgccgccctcggcgctgtcctgctcaccgacccgtccgccgtcgcccctgcgtttaccggggtgttcatggagaaaatggtcggttttatcaaactgtatttcccggtgttcctgctgggcgcggtgttcggcaagctgatcgagctgtcaggcttttcgcgctctatcgtggccgcggccattcgtttgcttggcacacgccaggcgatgctggtaatcgtgctggtctgcgccctgctcacctacggcggcgtgtcgctgttcgtggtggtgtttgcggtgtatccatttgcagcggagatgttccgccagagcaatatccccaagcgcctgatcccggcgaccatcgccctcggcgcgttctcgttcaccatggacgccttgcccggcacgccgcagatccagaacatcatccccagcaccttcttcaacaccaccgcctgggccgcgccgtggcttggcttgatcggcacgattttcgtgttctgcgccggcatgctctacctggcgcgccagcgcaacaaggcgcaacttgccggtgaaggctatggcacggagctgcgcaacgagccggaaaccgccgagaacctgaccctgcccaacccctggatcgcgctgtcgccgctgatcctggtgggcgtgatgaacctgctgttcactcactggatcccgcagtggtacggcaagacccacagcctcagcctgccgggcatgagcacgccggtgaccaccgaaatcgccaagctcaccgcgatctgggcggtacaggcggcgttgctggtggggattatcgtggtgctggtgttcggcttctcggcgatcaagagcaagctggccgaaggcagcaaaagtgcggtcagcggtgcgctgctggcggcgatgaataccgcctcggaatatggttttggtgccgtgatcgcctcgctgccgggctttctggtgctggctgactggctcaagagcattcccaacccgctggtcaatgaagcgatcaccgtgaccctgctggccggtatcaccggctccgcgtcgggcggcatgagcatcgccctcgcggccatgtccgaaagctttatttcggcggcccatgcggccaatatcccccttgaagtgctgcaccgcgtcgcggccatggccagcggcggcatggacaccctgccccacaacggcgcggtgatcacgctgctggcggtcaccggcctgacgcaccgcgaagcctacaaggacattttcggtatcacgatcatcaagaccctcgctgtgttcgtggtgatcggtactttctacgccaccggcattgtgtgaggtttgcatgacgacattgaacggcaagaccgccctggtcaccggctccaccagcggcatcggcctgggcatcgccctgagcctggccaaggctggcgccaacctgatcctcaatggcttcggcgacgccagcgcggtgatcacccaggtacaggcgttcggcggcaaggtcggccaccacccggccgacgtcagcgacccggcgcagatcgccgacatgctcgcctacgccgagcgtgaattcggcggcgtcgacatcctggtcaacaacgccggtatccagcacgtggcggcggtggaagacttccccgtcgagcgctgggactcgatcatcgcgatcaacctgtcctcggtgttccacagcacgcgcttgagcctgccgggcatgaaggccaagggctgggggcgtatcgtcaacatcgcctcggtgcatggccaggtgggttcggtgggcaaggctgcgtatgtggcggccaagcatggcgtgatcgggttgaccaaggtggtcggcctggaaaccgccaccagcaatgtcacctgcaacgccatctgcccgggctgggtgctgacgccgctggtgcagaagcagatcgatgatcgcgccgccactggcgtcgacccgcagcaggcgcagcacgacctgctggcggagaagcagccgtcgctggagtttgtgacgccgccgcagttgggtgagctggtgctgttcttgtgcagcgaagccggcagccaggtacgcggtgccgcatggaatatcgacggcggctggctggcccagtaacagcggacactggcgttcaaaatgtgggagggggcttgcccccgatagcggtgggtcagtcaccccatgtatcaattggcactccctcatcgggggcaagccccctcccacatttgaactgtattgtgtggaagacctagataagaacaagagaccttgctgatgtccgacattctctggcaaccctccccggaacgcatcgccaacacgcgcatggaccagttccggcgccacatcaacaagcgttacagcgtgcagcttggcgactacccggcgctgcaccagtggagcatcgaccaacgcccggatttctggcgggcgatcgttgactatttcgacgtgcagttgcgcagcccgcccaccgcggtgctgatcgaagacgccgagatgcccagcgcccactggtttcccggcgcgacgctgaattttgccgaacacctgctgcgccggcgtgatgatcacgtcgccgtggtggctatcgcagaagacggccagcgcgagcaactgacctatgccgagctggccgcccacgtcgccggcctgcaacgcagcctgcgcgctgccggcgtgacccaaggcgaccgcgtcgccgcgtgcatgcccaacacctggcaaaccctggtgggcatgctcgccaccaccagcctcggggcgatctggtcgtgctcatcaccggacttcggcacccagggcgtgatcgaccgcttcggccagatcgaacccaaggtgcttatcacctgcgccggctaccgctatgctggcaaagacatcgaccagaccaccaaactcaatgaaattctcgcgcgcctgccgtccttggagcagttgatcatcgtgccgtatgcgcgcccccaggccaggatcgaggactatcagacccacgcccgcgtcgcgctgtggcaagacgtctaccaacccggcggcgagcctgaattcgtcgcggtaccgttcgatcatccgctgtacatcctctactccagtggcaccaccggcgtgcccaagtgcatcatccacggcaccggtggcgtgttgctcacccacctcaaggaacacggcctgcacgccgacctgtcccgcgaggactgcctgttctactacaccacctgcggctggatgatgtggaactggctggtgtcggtcttggccctcggcgccacggcggtgctgtatgacggctcaccgtttcaccccggccccgagcgcttgatcgacctgatcgatgcggaaaaaatcagcgtgttcggcaccagccccaagtttctcgccacgttggaaaaggccggattgcggccgcgcttgagccacgacctgggcagcctcaaagggctgatttccaccggttcgccgctgtcaccgcagagctacgactacgtgtaccgcgagatcaaggatgagctatgcctatcgtccatgtccggcggcaccgatatcgtctcctgctttgtgatcggcaacccggtgctgccggtacggcgcggtgaaatgcagtgcaagagcctggcgatggctatagaagtctgggacgaccagggccggccgctggtcggcgaaaaaggcgagctggtgtgcacgcggcacttcccggcgatgcccatcggcctgtggaacgacccggaccgccagaagctgcgcgcctcgtatttcagccagtttcccggcgtgtgggcccagggtgactatgccgagcaacgcccgaatggcagcctgctgatccacgggcgctccgacgccgtgctcaaccccggcggtgtgcgtatcggcactgccgagatctaccgccaggtggaaaaagtcccacaagtgctggaaagcctggccatcggccaacgctggcaggacgacgtgcgcgtggtgctgttcgtgcgcctcaatgacggtatcgaactggacgaatacctcgaacagcagatccgccaggtgatccgtgccaacaccacaccgcgccatgtgccggcgaagatcctcgctgtcaccgatatcccccgcaccatcagcggcaagatcgtcgaattggcagtgcgcaatgtggtgcacggcgagccagtgaagaacaccgatgccctggccaacccccaggcccttgatcagttccgcaatcgcccggaactggcgcaaggatgaaaggtttcagcgctgacgtactcatttgaagacaaacccccaatgcatgctatttttcgggggtagtcacccatcgccgactgacgggataatgggtgttgtcatttttcaaagcgttacgctcagggctttttcatgattggaacatccgccggcagcgaagccgccgcattgattgcgcggctggactgggcgcaaagccctctcggtgaggccaaagattggccgcaaagcctgcgcacggcggtcgatatcgtcgtgcactcgccgatgccgatgctcctgctgtggggcaaccagctcacgcaactctacaacgacggtttcgcccaactggcgggcaacaagcaccccgaggccatgggccagccggcgcaccagacctggccggagcttgagagctttaccgcgccgatctacgacgccgtgctcagcggccaggtgcgcaccttcagcgagcagcgcttcgtactgcaacgccacaatcgcgacacggaaatctggctggacctcacctacagcccgatccgcgatgaaaccggcagcgtggccggcatcctggtcaccgccatcgaaaccaacgaacggcgcaaggcccagcacaacaccgagcaacgcctgcaactggcactggcggccaccgacgccgtcggcacctgggactgggacattggcgaagaccgttttatcgccgacacgcacttcgcctacctgcacggtgtcgaccccagcgatgcaagccggttgccgatcagcgcctacctgcaaggcgtgcacccggatgaccgtggcatggtggcgcgcagcatcaagcattgcatcactttcggcaccgaatacgccgaggaataccgcctgctgcaagccgatggccaactgcgctgggtgtttgcccgcgggcgctgctacaaggaccatcaaggccgcccggcgcgcttcctcggcgccgcgctggacctgaccgagcgtaaacacaccgagcaggcgttgcgccaaagccagaccgaactgcagttgatcatcaacgccatgccggtactgatcggttatgtcgaccatgaacagcgctttcgcctgaacaacagtgcgtacctggagtggtacggcatgacgccccaggaactgtacggcaagaccattcgcgaagtgctcggcgacgaggtgtacgccgggcgtgaagacaagatcgccgctgcgctcaagggcaaggcctgcagcttcatgaccattacgccgcaccaggatggtcgaccacgccatgccctgatgaagtacctgccacgcttcagcaatgacggttcggtgaatggtttctacatctttgtaatcgatgaaaccgaacgcaagctcaccgaagaagccctgcgtcacctcaatgaaaacctcgaagaacgtgtggcccagcgtacccaggcgctggccgaggccaaccagcgcctgcagaacgagatgttcgaacgtgaacgcgccgaagatgcattgcgccatgcgcagaagatggaagccgtgggccagctcaccggcggcatcgcccatgacttcaacaacatgctcaccggcatcatcggcagcctggacctgatgcagcgctacatcgccgccgggcgcagtgacgagatcgggcgcttcactgatgccgccgtgtcctccgcccaccgtgcggccgccctcacccaccgcttgctggcgttctcgcggcgtcagtcgctggaccgccgcccgctcgaccccaaccagttggtggcctctcttgaagagttgttccgccgtaccaaaggcgcgcatatcagcctcaaggtgcagctcggccatgacatctggccggtgaacaccgacgccagccaactggaaaacgccctgctcaacctggtgatcaacgcccgcgacgcgatgcccgatggcggagaactgctgatcgaaaccgccaacagttacctggacggcaccgacatcaccaccctggaaccggtcaaggccggtgactacgtgatgctcggcgtgtgcgacaacggcaccggcatggcgccgaagattctggccaaggcgttcgacccgttcttcaccaccaaacccatcggccagggcacgggccttgggttgtcgatgatctacggctttgcccagcaatccggtgggcatgtgaccatccacagcgaaccgggccagggcacctgcgtgcgcctgtatttgccgcgcctgcacggcacctccctggaaagcagcttgcccgccagccacagtgaagcgccggtggccctggccggtgaagccgtggtggtggtcgaagatgacccggcagtgcgcatgctggtggtcaatgtgctcgatgaactgggctacacggcgcaccaggcgggcgacgctcgggccgcactgccgctgctggagtcggatctgcgcgtggacctgctggtgactgacgtcggcctgccaggcatgaatggccggcagcttgcggaaatcgcccgccagcaccggccggggctgaaggtactgttcatgaccggttatgcggaaaaagccgccgagcgccagggtttcctggaagacggcatggacatggtggccaagccgttttccatcgagctgctggcgacaaaaatccgcagcatgatcaacgccaacgaatgagttcaggcataatcgcgcgccgtcgcacacctggtagagatcaatgaaagcccaagcccgtcatatcctggtgaaaaccagcgaagaagccgaacagctcaaacagcgcatcgccaagggcgaggcgtttgatgtgctggccaagaagtactccacttgcccgtccggcaaacgtggcggcgacctgggtgaagtgcggcccgggcagatggtgggggcgatcgatgcggtgatcttcaagaaaccggtgaaggtggttcacgggccgatcaagagcaagttcgggtatcacctggtgcaggtgttttaccgggattgatgggttggctgcagaccgctatcgggggcaagccccctcccacatttgaataggttcacaaatcaaactgtgggagggggcttgcccccgatccgccgcaggcggccattcacccccggggaatcagcgcccccggcacctggataacccgactggccaaccgatgcccagccaatgcagcctgctccggcgagcttcccttgagccgcccggccaggtacgccgcactgaacgaatcccccgccgctgtcgtgtccaccaccttttccaccttgatcgccggcacgcaaaagcgctcgccgttgcagcggatcaggcacgcatccgcgccacgcttgagcaccacctcttcaatccccggatacgccgcgaacacctgctcgctgtcggcatacccaaacagcgcacgctcgtcgtcctcggtgagcaaggcgatatccacttcggccaggacacgctcatacgcagcacgcgccgcctcgacgctcgcccacaatcgcggccggtagttgttgtcgaacaccaccttgccgccacgtcggcgggtttcgatcagggtttgcagcaagcgttcgcggccgacttcacccagtacggccaaggtgataccgctgaaatacaccacgtcatagcccggcagcgcggccaggatcggctcggctgccggcgtggtgaagcagtcgcgcacggcggcttcgttgcgccaatacaggaatttgcgctcgccattggcgtcggtctggatgcagtacaaccccggcagacgtccaggcaggcgctggaccctgcccaagcccaacccttcgtcgatccactgctggcacatggcgtcactgaaactgtcatcccccagggcggtgacatagtcgacgctgccgatgtcgcccagctcgcggcgcaggtacaccgccgtgttcagggtatcgccgccgaagctttggtgcaggctgccatcggcgcggtgttgcagttcgatcatgcattcgccgatcagggcaatgcggggttgggtactcatagtgatggtctcgggtgtggctgatggcctcatcgggggcaagccccctcccacagtttgatgtgtgaacctattcaaatgtgggagggggcttgcccccgataggatcgacgcggtctagaagcaggtaggcagggactcgatcacctgcaatttttcatccaccaggcaaccgacctgccacttgtcgaaggtcaggcaagggtgcgaggtgccgaacgagatgatgtcgccaatccgcaactcaacccccggcgccaccgtcatgaacgcatgctggtccatcaccgccgtaaccttgcagccactcacgtcatcgccttcggccggcacaatacccgccttgtagcgcttgagcggcaccggcagaccggcgtcgtaggccacgtcacgcttgcccagggcgatcaccgcaaagcccggctcgggcaacgattgcacatgcgcccagacttccagggccgggcgcaggccttcgttgaggtcactgcggcggtcgagcacgcagcattgcgcatctttatagatgccatggtcatgggccacgtagctgccggggcgcagcacactgaggaagcggccggcggcgttctgttgttcgaacgactcggcgatcaggtcgtaccaggccgaacccgacgcggtgacgatgggcttgggcaggtcgaaagagccgttgctctgcaaatccaccgccaggcgcaccaggctggcggcgaaatcgcggatgccgctgatggcatgctcgccgtggatcacgccctcatagccttcgataccggtgagagccagggccggctgggccttgatcgccttggccagctcgcgcacttcctgctcgctgcggcaaccgcaacggccgccgaccacgccgtactcgatcatcacattcaggcgcaggccacgggcggcgaagaacaggcccaggtcagcgacgttgtccgggtgatcgaccatgcagtggaagtcgaagtccttgtcggccagcaggtcagcgatcaacgccatgttcggcgcgcccaccagttggttggccatcaacacgcggcgcacgccaccggcatacgcggcgcgggtctgcacagcgttggccagagtgatgccccaggcgcccgccgcgatctggcgctggaacagcgccggcatcatgctggtcttgccatggggcgcgagctgcgcgccgctcttgctgacgaagtcctgcatccaacggatgttgtgttccagcgcgtcacggtgcagcaccagggccggcaggctgacgtcacggaccagatgggcaccgacagcggcggcgcctttttcaacggcattgatggcagacatgaaatgctcctattcgttgatgcgacgagccaggttgttggcgctttcgatcaacacccggcgatagtcgttgtaatttttgatcgcgtcggcgcgcggggcgacgatgcacaaagtcgcaatgctgatgccttgcgcgtcccgcaccggggcggcaaagcaatgggtaaaggtgtcggccacactgtcgaaggaaaagaagccatcgagggtggcctgacggatttgcgccaggaaggtatccagcggcaggcgctggccatccggcaggatgaagtcgtcgtggtcgatcaggtcgacgatctgctggtcgctcaagtgccccagcaacaggcgcccggaggcagtccaggggattggcgcgttttcgccgatatccgaagaaatgcggaaatgccgctcgccctcgcgcatcagcgccaccgtgtatttgcgcccgttgagcaggcacatctgcgcggtttcgcgggtctggctgacgatctcctgcaaggcgtgatcggcctcgcgggtcaagtcgaaatgacgcaggtgcgcctggcccaggaagtacagctggcggccgaggtagacgtgaccgtccttgcccaccgtttccaaaatacgacgttcaagcagcgacgcgaccaattcgtagacagtggatttggggctgccgatgccgctggcaatatcattcgggcgcaggggctggccgatttccttgaggaaatcgaggatatcgaatgcccggtccaggcctttggcgcggcgtttgatggtgtcttcggtcatggcagccttcgattcctgtaaaaatgctgtgatctgcgcagatccttgtgggagggggcttgccccgatagcggcgagccagtgacctgtgcttgtgctgacacaccttcatcgggggcaagccccctcccacattggattttccgtggtttcaagaatggggcatttagccctttttcttgtaggccacgcaatcgatctccaccttgcagtcgaccatcatgttcgcctgcacacaggcccgcgccggggcatgttccggggtgaagtattcgccgaagactttattgaaactccagaagtcccgcgggtcctccagccatacccccacgcgcaccacatctttcaattcgtagccagcctcttcgaggatcgccaccacgttgcgcatggtctgccgggtttgctcaatgatgccgccagtgatgatttcgccatccaccgcaggcacctggcccgagacgtacaaccaaccgtccgcttccacggcgcgggcgaaaggacggggttggccgccgccggcagtactgccggcaccataacgagtaatgctcataacaacaggctcctgattaaaaacgaatgttcttgagaaattccgccaggcgcggcgattgcgggcgttcgaagatgtccttcgaggtgccctgctcttcaatgcggccctggttcataaacacgatcttgtccgagacttcataggcaaagcgcatttcgtgggtgaccagcagcatggtcatgccctcttccgccaggcccttgatcacgctgaggacttcgcccaccagttccgggtcgagggccgaggtgacttcgtcgaacagcatcaggctggggttcatggcaatcgcgcgggcaatcgccacacgttgttgctggccaccggacaactggccgggaaagtggttacgacgctccagaagtcctacacgatccaaccatttttccgcgagcgccaccgcctcgtccttaggcattttcttaactttcaataagcccagggtgacgttttgcaacgccgtcaaatgcgggaacaggttgaactgctggaatgccatgccagtcatcgcccgatgctgggcaatcacgcgctcggggtgacgcacgcgcttgccgccgatgtcgcggtagccgatggactcgccgtccagggtgatctgcccgccctggaactcttccagcaggttgacgcagcgcaacagggtggtcttgcccgagccgctggagccgatcagggtcaccacgttgccgcgctgcatggacaggtcgacgcccttgagcacttccacctggccgtactgcttgcgcaggccactaatgttcagcaagggtgggttggtttgaggttggttcatggcaaggccacccgcttttcaatgtagcgcccgaataactcgatggcgtagttgatgacaaagaacataaagcctgcgaacaggtagaactccagggtcatgaaggtgcgtgcgatcacttgctgggtgctcaacagcaattcggccacgccgatcaccgacagcaaggtcgaggccttgacgatttccgtggaagaattgacccaggtcggcaggatctggcgcaacgcctggggcaacagcacgtagcccagggactgatagaacgtcaggccgatggccttgcccgcttccagttgcccacggggaatggcctgcagcgcgccgcgcacgatttccgaaacgtgggagccgcagaacagcgtcaacccgaccgcaccggcctggaacgcagtgatctgccaaccgagcgccggcagcatgtagaagcacgccaataccaacacaaacaccggcgtaccgcggatcaggtcgacgtacagccggaacggcgcccgcatccagaatttgccgtaggtcaggatcaacccggcgacgataccgatcagggtaccgaagataatcgccagcgcggacacataaacactggcttgaaagcccgcccagagggtatcccgggcgatccacaactcatgcaaccagctgggggattcgtacatggaaaccttccttaacgacggatcgccagacgctgctccaggtaacggagcagcatggcaatgaggtaacaggcggccacgtagagcgcggtcgtgaccaaccaggtttcgatcacccggtagctttcgacgttgatcttgcgggcgtaataggtcagctccggcaccgcgatggcggcggcgagcgaggtgtccttgaacagcgaaatgaagttgttcgacagcgcgggcagcacattgcgcagcatcaccggcacggtgatgtaggcgcggatacgccactcacccaggccgatggccagcccggcttcacgcaagcccttgggaatattcagcagcccggcgcggaacacttcggtcagataagccccggcgtacaacgacaaggtgatgatgaacgacgggatcttgtccaggcggatgcccaggctgggcaaggcgaagtagatcaacaggatcaacaccaggatcggcgtattgcggatcaccgtcacatacaccgaggccagcacgcgcagtgccttgtgtttcgacagcatggcaaatgccatcatcaagccgatcacgcagccaatcgcaatcgacagcagcgccagctcgaggcccaggccgagccccgccagcaagctggggaagtcgcgccacacggcggcaaagttcaactgatagttcatggtcagcagtacctgattggggcgccgtcagcgacgccccaggttttcgatttacttgaactcaaccgggaagccgatcgcaggttccggcaggtccacgccgaaccattgcttgaacgaggccttgtaggtcgggaactccacgccggtcatggcttcatgcagcgcggtgttgacgaagttcagccagtcctggtcgccacgcttgacggcgcatgcgtaggtctgtgggctccaagcgtacgtcgggctgcggtagcggcctgggttctgcaccatcaggtatttgaccgaagactggtcggtggcggcggcatcggcgcgaccagaattcacggcctggtacatcaggtcgacgctgtcgtactggtcgaccttggccttgggcagcgcctggtgcaccagttcttcggcgtagacgttttgcagcacggccacggtgacgctgtcgccggcggcctgcaggtcttcgatttccttgtacttgctgttgttcggcagcagcaggcccacgccttcgcggtagtacggcagggtgaaggccacctgctgcgcgcggctggcggtgacggtgatgaactggcaactcatgtcgaccttgtcggtgagcaggttggggatgcgcgcgtcagaggactgcaccacgaactcgaccttgctcgggtcgttgaacaaacccttggccacgatgcggccgatgtcgatatcaaacccctgcaacttgccatccgctccctggaagtgccacggcgcattggtactgcctgtacccacgatcaggtgcccacgcttgagcacatcatcgagcttgctgtccgccgcctgcactacgcttgcgagggaagccgatgcggcgaagagaaaaacacacgctttgaacacggaaggtcggtgatgcatgacaagcactccaggggttgtgtattccgctataccggaacttagtatgtaacaacggaatagacagcagaaagtgtgccacacgcggtaacggaaaaacacgacatgaataaatctgttttagatcaaatagataaaagatgattcgtgacaaggtgctaaccaacacttgaaatcactttgctacgcaaggccccacacagcggtgacaggccccactggcgtgcgacatagcggcgttaccgcgcaccgttgcagtgcgccggttgcgtggaaaaatccccacgctgggctagccttggcacattcattccaacaaggactccaccctgatgacgtttcgcctcaccctggttttgctgtcctttctggtggccggcaacgctctggccagtaacgaccgccgcgaatgcaaggcagagctgcgtaagctcaacgaagccttgagcaccaattacaccagccagaaccaccatggctaccgccaggcaaaggcctcaagggataacctggaatacaagaaatgcgcgagccaggcgcgtaaagcccgtgaacgcttggagcgtgacagggacctgtgaaggttgacagtagacgactgacgcctccggacttagcgtgagctaggtttctgactggagaacgtcaatgagctatttcaatgcggttatcgagaacaaagaagcttttgaacaagctctggatacaccgctcaccgtgtttgccctgttcgcctccgaaggctgtcacgcatgcaatgtgaccctgccgtggttcgtagaaatcaccaaagcgcaccagggaaaaatcaaggtattgatcctcgactgcgcgaatacgcccagacaccccaaggtcgtgcgtattccaacgctacttatctaccaacaaggtcagttgatgtcgacccttgaaggggttaccgagtcggctctgctccaggcactcgcagagtttgcttgatcaacctggcggttgcgcgacacgaccagcgtctacgcggctcaaagcagtctcagccatcagggtcagccatgttcaagaccattgaagcctaagtcctgaagaaacacccctcatccgccttgcaacttgagttcgcccagcatgatttcgagcgactcaagcccttatgcctgctgatctatatcgcgagcatctgcatctggctcgtgttcgacctgatcgtgagctttccgggcggccagggctttaccggggggccacttactggataatagctcaatgccttcattgagttaatgttcggcaccccctctaccgcctcgatggattttcttctgcgtatggacactcctctgcttccacaaaaacgcctcaatgctgcaatcaccaaagtaatggccggtatcagcgcaacgctgggcgccatgtgggcgctgatcacctatgtgtttcccgaccccagcgtgttcggctttggctttctcaactggaaaaacttgatactggtaatcagcgtattcctgttcctcgcggcagtgtctattggatggcaggcgcgtcgcctgccggacgcgataaaaggcacgctttcggtgatcctggccgtactgctcgccggcggttttttcattctgggtagcgagtacgccaaacccactttcgaatttgcccaatcacaaaagttgatgactgaaaatgacggcgccaacctgtttggcaagcgtatcgagctagtcgacggtgtacgcttcgaactgctggagtgtgagcagattggccaggcaccgagctgcctgctggaactcaccaacacccatgtcgaccgcgaaatgcgcgacctaaagcaaagtactctgtttgaaaaaaccggcggttctctggatgtcgagcaactgcttgttggccagtcaaagtctgaccagtggaacgcctttgcgttagtgcgcaatgtgccgacccgcgtaacgatggtgttccaacccgtgcgcgggaagctggagagcatcccggcactcaagatcaggtttcgcagcctcaagggcgaggataacgtggtcaagttcagtggcgtagcggttaactgaggggatggatatgagcaccgcaactgcaacagagaacgccgaccagccctgggaagctacgttgattctggcgtttcgcgatattcagtggatccttcactgcgaaaaacagcaggcactgatttcagtcgcgcttgcccagttcctcttggacaatcaatcactgctgtgtaatccctcggacccaacacagcaaaatacctgcaatgagaccaagggaaagctctaccgggcagtggaaaaaatggcggtaacgccgccactcctcgcgaaattggacggcaaggctgaaagtgcagcgggcgacgtgctaaccgcccatgaagaccggttcttcctgattgaattcaaatcggacatcagcaccagaagctccgaatacaccaaattcctggggattctgatgtggctgatcgatcccgacgccaaccacgtactgatcaagcggtcaaaaaaggggcatttttttgtcacacagcagcccgacgcatccgcaccctctaacccaaacctgcgcaagctcactatggaggcctacacttactacgacgctatcacccagcccgacttaaaaccgactgcggcgatccccgtgcatacgctcctggcggaaaaacgccacggcctgtcgctggctcacatggcggactaccttcaactgctctgcaaggcccatgtcggtgactcagcaggtggcgcgcacccgatgaaagtggcggtggcaagtgcatccgggatgttctggccgataaccgacctctcggagctgagtgcattggccggcttgttcaacacgaccgcagggccatcgcgcccaacacacccggcatttggcactgcaaacgccaaacacttgaaaggcatcgtcgatgccttccgaaaaaagacgccggcgcagcaaaaagccgcgctcagacgtgacggcagaacacccggcggcgccactccaggcctcaaaggaagctgagtggcaacacttgcacccccatcaggaacccacgcaccgaagcaggctgacctgcgtcacccggcggtcttccacagccgccacggtcaagcaccaaccctcatgctccaggctgtcacccaccaccggcaggcgatcgagcagactcatgaccaggccggccagggtctgatagtcatcggtggcgaccgcgttgaaaccggtacgctggcgcaccaggctgaggttcaaagcgccattggcgcggaacccatcaccctcctcgacgatgtcaggcccttcgatttcgctggcatccggcaactcaccggcgatggactcgagaatgtcggtcatgctcaacacgcccataaagtcaccgaattcgttgatcacgaacgcaatgtgggtggattcctgacgcatctgctccagcgcattgaggatcgagaaactctcgagcaaattgatcgcccgacgtgccaggtgctccaggttcggctcgttgccggccaggtattccttgagcaattccttcttgtgcacaaagcccagcggctcgtcgacggcgccgttgcggatcaacggcagtcgcgagtaggacgaatgcatcagtttcaggcggatactctcgggatcatccgccagatcgatgcagtcgaccttggcccgtggcgtcatcagcgtgcggatcggtcgctcggccagttgcagcacaccactgatcatcacgcgctcacgtcgatcaaacagcgggccttgagtggcatccggctcgccgagcaggtcagccacctcgtcacccacctcttccaacgccaggctgcgaccgccgagcaggcgcatcaccgcatgggcggtacgctcgcgcaccggcaacacgccttgcgccgacttcttgcggcgtgaacgggcgatctggttgaacacttcgatcaggatcgagaagccgatggccgcgtacaggtagcccttgggaatatggaaacccaggccttcggcagtcagggcgaaaccgatcatcatcaggaagcccaggcacaacatgatcaccgtcgggtgcgcgttgacgaagcgggtcagcggcttgctcgccacgatcatcaggccgatggacacgatcaccgcgatcatcatcaccgccagttcgtccaccatgcccacggcggtaatcaccgcatccagggagaacaccgcgtcgagcaccacgatctgcgccacgatcggccagaacatcgcataggccacattgcccgtgcgctgggccacatgcccttcgaggcgttcgtgcaattccatggtggccttgaacagcaggaacacaccaccaaacagcatgatcaagtcacggccggagaagctcttgtcgaacacctcgaacaacggctgggtaagggtcaccaaccaggaaatactcgccaacaggcccaggcgcatcagcaacgccagggacaggccgatcaaacgcgcacggtcacgctgctccggcggcaacttgtccgccaggatcgcgataaacaccaggttgtcgatgcccagcaccagttccagcacaatcaaggtcaacaggccgagccaggccgttggatccgctaaccattccatttatagagtctcttcaatcggttttcagaatgccggacacggcgaggcgcggtcggtggaccggtacagggctggcaatcggaatacggggtgcttcaacgggaacagcggcagcggatgtcttggggaaagacgactgggaggctccgagagggtgttcatgcaaatcctgcaattacaaaaggacttgaatcgtacagtcgaaaggcaaatttcccacaacccaaaactattacaagatctgtaaaacctttcacaccaattcgatcacttgatcaccaaatgaaattattatcactgcaaacacatcaaaacccatgccaaaaaccgacaaaaacagcctaaaaacctataagccagcctatttcgcagtttttcgtgaaagaatttgactgatcagaatttcatttgataaacatatgatcagtacaggcaatgaatgaacgactgactacaacaataaatggggtgctcatcatgaaacttgctacgaccttcgccgccgctgcggccctctccctcctcgccagcagcatcgccctggccgccgacggcaagacctacaaggtcggcgccgcggtctacggcctcaagggccaattcatgcagaactgggtacgcgaactcaaggagcaccccgccgttaaagacggcaccgtgcaattgaccgtattcgacggcaactacgacgcgctgacccagaacaaccagatcgaaaacatggtgacccagcactacgacgccatcctcttcgtgcccatcgacaccaaggccggcgttggcaccgtgaagcaggccatgagtaacgacgtggtggtcatcgcctccaatacgaaagttgccgatgccgccgtcccctacgtgggtaacgacgatgtggagggcggccgcctgcaggcccaggccatggtcgacaaactcaacggcaagggcaatgtggtgatcatccaggggccgatcggccagtcggcacagatcgaccgggaaaaaggcgagctggaagtgctgggcaagcacccggacatcaagatcatcgagaaaaagaccgccaactgggaccgcgcccaggccatggcactgaccgaagactggctgaacgcccaccctaaaggcatcaacggcgtcatcgcgcagaacgacgacatggccctcggcgcggtacaggccctgaaatcccacggcctgacctccaaggatgtgccggtcacctccatcgacggcatgccggatgccatccaggccgccaagaaagacgaagtcaccaccttcctgcaggacgcccaggcccagtcccagggtgcgctggacgttgccctgcgcgctttggccggcagcgactacaagccccgctcggtaatctgggaacgctacgccaaggatgtgaagtgggctgacggcaccgcgaagaactacatcctgccctgggtgccggtgaccaacgccaacgccgatgcgctgtacaagcaagtcagcggcgccaagtaagccgtcgccggttgatcgctccccgtatgggagcgatccgttcatctttgttgtgaggcctgccatgtccactgtcaccgaacgcccgcaagaacaactgcatcccgccatccccaaaaccatgcaggccgtggtctgccatggcccggaagactatcggctggaaaccgtcgacgtgcccacccccggccccgaggaaatcctcaccaaggtcgagttgtgcgggatctgcatgggcgacatcaagacctatcgcggcgcgccgtcgttctggggcgacgccgagcaaccgcgctatgtgaaaccgccgatgatccccggccatgaattcgtgtgccgcgtggtcgccctggggcctggcgcggaaaagcgcggtatgaagatcggcgaccgggtcatttccgagcagatcgtgccgtgctggggctgccgcttctgcaaccacggccagtactggatgtgccagaaacacgacctgtacggcttccagaataacgtgcagggcgccatggcccagtacatgatcttcaccaaggaaggcatcatccataaggtcccggattccatcgccccggatgaagcgatcctgatcgagcccctggcctgctcgctgcacgccgccgaacgcgccaatgtggactttgatgacgtggtagtggtcgccggtgccggcacgctgggcctgggcatcattggtgcggtgcgcatgcgcaacccaaagaaactcatcgtgctggacatgaagccggaacgcgccgccctcgccctgcgcatgggcgccgacgaggtgtggaacccggccgaagtcgacgtgctggcgaagatccgcgacatcaccgatggctacggctgcgacatctacatcgaagccaccggccatcacaaggcggtgaaccagggcctggcgatgctgcgcaagctggggcggttcgtcgagttcagcgtgttcaatgacgaggccacggtggactggtcaatcatcggcgaccgcaaggaactggatgtgctcggctcgcacctggggccttacatgtacccgcgcgccatcgactttatcggcaaccgcaagatcgacatgcgcgacgtggtcacccacaaattcgccctggcggacttcaaggaagcgtttgcggtgatggagcgcggcgacaagtccctcaaggttgtgcttgagccctgacctgctggatataccgcaccactgccggcgctttctcgaagcgccggtaaatcaacgacaaccaggacgacgcctcattgccctggatcgcgcggtacaccacccccggcaagctcacatgccccaccaccgacgtcggcaccaccgccacgccctgccccaatgacaccaacgcaacaaccgccaccaacccacccggctgcggccccaggcgcggcgcaaaaccaccttgggccgccacgtgcagcgtgccgctgatctgttccggcaggatgaaggtctcgttttgcagatgctcgcagtggatgaccttcaaacccagcagccatgaatcctgcggtaacgccagcacaaaaccgtcactgtccaggcacacggcttccacaccgtccggcaaggtcatcggcgaacggatgtagccgatgtcgtagcgcccgtccgcaacggcgcctggcagtgtggccatggcgcattcgcgcacgttcacgctgacatcgggaaacgcctggcagaacgcctgcatctgccgctgcaacacgccggaatacacggcagaagccacgtagcccaactccagatggccgatctcgccacgcccggcacgctgggcattgcgctgggcaaactcgaactgacgcaccgtcgcctccgcttcgatcagcagcgtggcgccggcctcggtcaggctgacttcgcgctgctggcggacaaacaggcgcgtgcccaggctggtttccatgtcctggatctgtcggctcaaagtggggggtgcgatccccaactgctcggcagcgcgggtgaagttgcgctgacgggcgacggccaggaagtagcgaaaatgacggatttccatttcagcattagctcaaaggtaatgaaatgagtcagcctggctaataaaggcgctgggcagcgcggatatgctgaggcaaaccagaacagtagagagcccttgcgatgtccgtcaactgcattccgcctattgcctttgaggtaattcaaccatgagccgggtcagcccacgcctgaccctgctgaccgcgtccggcgtctgctcgctgatcgtgctcgacaccaatatcgtcgccgtgaccctgccgagcattgcccgcgacctcggggcgaacttcgccgatatcgaatgggtggtcagtgcctacatgctggcgtttgccgcgttattgctaccggccggcagcattgccgaccggttcgggcgcaagaaaaccctgatctgggggctgagtattttcatcctggcgtcattgggttgcggggccgcgcccactgcgctgctcctcgatatcgcccgcgcggtcaaaggcgtgggcgcggcgctgttgctcacgtccgccctcgcctccatcggccataccttccacgacgaggtggagcgcgccaaggcctgggccttctggggcgcgtgcatgggcgtggcgatgactgccgccccgaccctcggcggcctgatcacccagtacctgggctggcgctggatcttctacctcaacttgccggtagggctggtgctgatgagcctggtcttgcgcgcgattccggaatcccgcgacacccaatccgcaaggctcgacccctggggcagcctggcattcagcgccagcctgctgtgcctgatctgggggctgatcgaagccaatcgcatcggctgggacaacccgttgacctacgcccgcctgatcggcggcgcggtcttgctgggcgtatttgtgctcgtcgaacgggtgcaacggcggcccatggtcgacctgcaactgttccgccacccgcgctttatcggggcgttgctgggaatgtttgcctatgccggctgtgcccaggtgatgatgacgttgttgccgttttacctgcagaacggcctggggttttccgcgatcgcctcgggcctgggcatgctgccgtttgcgctgaccatgctgatttgcccgcgcatcggcgcacgcctggccgcacgctttgcacccgcgacaatgatggccgccgggttgacgctggtgggcagcggtaacctcttgagtgcctgggcagtgaacgccggcggctacctgcccttcgccctggcgattgccgtcaccggcgccggtgccggcttgctcaatggcgatacgcagaaaaacatcatggcctgcgtgccacgggaccgcgcggggatggcgtcgggcatgagcacgaccatgcgcttcagcgcgatcatgctggcgattggggtgtatggggcgttgttgagcagtcatagcgagcagctgttgagcgccaccatcggcgcgcaatggcaggcgcaggtgaacgggattgcttcacgcgtagtggccggggatatgccggcggcgatgggcttgttgccggaatcggcacgggcggtgatacagccgctggcacggcaggcgtttgtgggtgggttcagcggggtgttatgggtgtcggggttgttggggttgcttggagcgttggtggtggggatgttgatgaggaaccccattccagcggtgcaacaggcctcaataaaacctgcgcaccgctgatcagccttaccagaaccgctgctgggtcaaccggctccaccaggtcagcagcacccggtccaccgagccgctggccgccaggcccacgcgctcctgcaggctcttgcgctcggcatagtgcaagtggaacacctcggcggtcttggccttggtggccaggtattcgtcgctggtttgcagctcatcgaccagttgcttgtcgagggctgcaacacccagccacacttctccggtggcgacgtcatcgattgccaactgcgggcgataacgcgacacgaagttcttgaacaactggtgagtgatgtccaggtcttcctggaacttctcgcggcccttctcggtgttttcgccaaacacggtgagcgtgcgcttgtactcgccggcggtcagcacttcgaagtcgatgtcgtgctttttcagcaggcggttgacgttaggcaactgcgccaccaccccaatggagccgaggatggcgaacggcgcgctgatgatcttctcgccgatgcacgccatcatgtagccgccgctggccgcgaccttgtcgatgcacacggtcaacggcacgcccgcctggcggatacgcgccagttgcgacgaggccaggccgtagctgtggaccatgccgccgccgctttcgaggcgcagcaccacttcgtctttcggggtagccaggctcagcaatgcagtgatttcgtggcgcaggctttcggtggccgaggccttgatgtcaccgtcgaagtccagcacgaacacccgtggcttggcctcggccttctgcttgcccttcttcttttcggccttgccttcggacttgcgcaaggccttgagctggtccttgtcgagcagggtcgactccaggcgctcacgcaggcctttgtagaaatcattgagcttgctgacctgcagctggccggcggatttgcgacgccctttactgcgcagcgccgcgaagctgatcaataccaccagaatagcgaccaccagggtgacggtcttcgccagaaagctcgcatattcggccaaaaaatccatgttgctccttacaagtgcagtgcgccgggcgcggattgccccagcataccggcggcaccgcgttcgagccagtgatcaaaccgccagcaacgacaggctccaacgagcttttaaaacaagcgtatgttttttcattgacagctcgcaggcatcctcataacctcgccagactttcaacgtaccgggaaaacggacgtgggcagcatctatctgattcgacatggccaggcctccttcggtgcagacgactatgacgtgctgtcgcccgtcggcgtggagcaggcacaagtgctcggtcgccacctggcggacatgggcctggtgttcgaccgctgcgtggccggcgacctgcgccgccagcagcacaccgccaccgccgccttcgagcagtaccacgccctcgacttgccggtgccggcgctggaaaccgacagcgcgttcaacgaattcgatgccgacgcgatcatccgcgccctgctccccgacctgctcaccaccgaacccgaagccctggagatcctgcgcaatgccgcgcagaaccgcagcgagttccagcgcatcttcgccctgatcatcgagcgctggctggccggcacctatgaccctccggggctcgaaagctggctgggcttcgtggaacgtgtgcaaggcggcctgcaacgcatccttgaagcggcggacaacacccagaagatcgcggtgttcacctccggcggcaccatcaccgccctgctccacctgatcacccggatgcccgccgcgcaggcgttcgaactgaactggcaaattgttaacacctcgctcaaccagctgaaattccgcgggcgcgaggtggcactggcttccttcaacagccatacccacttgcaactgttgaaggcgccgcagctcatcaccttccgatgaactgcggccaaccgtgaccccaaggtcactggactctacccaaaaggatcgaaaccatgactgacgtagccaaagctgtagaagcaatgaaagccaaattcaacccaagtgctgccgaaggcttggacctggtattcggtttccgtatcgatgacaccaagaacttctccctggtcgtcaaagacaagacctgtgaactgcaggaaggcgaaaacccggacgcccaggtgaccctggtcatggacagcgaaaccctggaaggtattgtcgacggctccaccgacggcatgcaggccttcatgggcggcaagctgcgcaccgaaggcgacatgatgctggccatgaagctgagcgagctgttcccttcctgattcacgggcgaccctgaatcccgatcccgccttcacaggcgggatttttatttgggctgcagcaacaacgccaccaacgcactccacccggtttgatgcgaagcccccagcccccgcccggtctcgccatgaaagtactcatggaacagcaccagctcacggttctgcgggtccgcctccaactgcgcatactccaccatcgacggccgcgagccgttttcatccctcaggaacaaccgcgtcaggcgctggctcaggctgtcggccacttcctccagggacgccagataaccgctgcccgccgggtactccaccgagaagttgtcagcgtagtagcggtgaaattcgcgcagcgactcgatcaacatgtagttcaccggcatccacaacggcccgcgccagttggagttgccaccgtacagccgcgagtcggattcacccggctggtaacgcgcactgagggtgttgccattcatcttcaacgccagcggttgctcggcgaatgccttggacaaggagcgcacaccaaacgtcgacaggaactcatgttcatcgagcatgcgccgcaacaggtctttggtccgctcaccgcgcagcagcgccagcaacaggcgattgccctgccccggttcgttccagcgtgaaaccagcttggccaggtccggccgatgtttcatgaaccccagcagacgctcgcgcaagccctccaggccctcatgttcgtgctgctccagtaccagcacggcaaacagcggcatcaggccaaccatcgaacgcaggcgcaccggctcgttctggccatcggggcggtgcagtacgtcgtagaagaacaggtcctgctcatcccacaggccttcggcgctgtcgtcgacacggttgatggcgccggcgatgtacaggaagtgctcgaagaacttcaccgagatgtcgacatacaccgcattgcgcttggccagctccaggccgatgcgcatcaggtccagcgcataggccgcgacccatgccgtaccgtcggcctgatccagctgataccccggcggcagtgcagcggagcggtcgaacaaggcgatattgtccagccccaggaaaccaccctggaacaggttgcgcccctcggcgtccttgcggttgacccaccaggaaaaattcagcagcagcttgtggaaaatccgctcgaggaaatccatatcgcctacgccgttgagcgccttgtcctgctgatacacccgccaactggcccaggcatgcaccggcgggttggcatcgtcaaaccgccattcgtaggccggcaattggccgttggggtgcatgaagcggtccttcaccagcagcaacagctgttgcttggcataccccggatcgatcagcgccatggccaccgcctggaagccctggtcccacgaggcataccacgggtattcccacgtgtcgggcatcgagagaatgtcgaagttggacaggtggcgccaatgggtattgcggatatgcaggcgctcggggggcggcgcgggttgtgcggggtcgccgtcgagccattggttgacgtcgaaatagtacagctgcttggaccacagcaacccggccagtgcctgacgctgcacattgcgcgcatcgtcgtcggccatgccacgttgcagggcggcgtagaagtcatccgcttcctggcggcgttgttcgaacagcttgcgcgcgttgacctgtggcgcgtcgacaggagcaaagcgcaggtagagacttttgctttccaggccggccagttcgacgatgaaacgcgccgcgactttggtgccgctgtcacgccgaattgccgattgaacaccctcgaccacgaaatcgttgatcccgtccttgaacggccccggtgcaggctgcccatccagcctggggtagttggtttcgttctcgcagaacagccactccagcccgtcctggccccaggcgctgagatgacggtccggcagttccggatggcgtgccagcacctgcgccccgtccaacaccagctgcggcttggtcgcgtcaaaggtccagctccagtcattgcgcgcccacagttgcggcaacacctgcagccgcgtcggctggtccgagcggttgtgcacggtgacgcgcatgaagatatcgtcgggttggtgcttggcgtattcgacgctgacatcgcagtagcggttgtcttcgaacacgccggtgtcgaggatctcgtactcggcatcggccaggccacgccgtgcgttttcgctgatcaggtcggcgtagggaaaggcgacatgggggtatttgtagagcatgcgcatgtaggcatggctcggtacgccgtcgacgaaaaagtacagttccttgacgtcttcaccgtgattgccctcggcgttgtcgaggccgaacaggcgctccttgaggatcgcgtcgcgctcgttccacagggccaggcccaggcaccagcgttgcgccttgtcgctgaaaccggccaggccatcctcgccccagcggtaggcgcggctgcgtgcatgttcatgggggaaataggcccaggcgtcgccgtcggcgctgtagtcttcgcgcaccgtgccccattggcgttcgctcagataggggccccactcgcgccaacgctcggcatcctgctgcgccaggcgctggccttcggttgtatcaagcattcgggtgtcgggtgtggccgtcatcgggtcctccatcgcctaccaggtgagaggcagtgtagagcccaatgacgcccgggtgcacatgaagacttagaagatggcgtaggtgtagttgaagatcaggcgggtctggtcctggtcggcagtaccggtgttcttgccgtgataggtgccggtacggaacgtggtaccgaagcctttcaggggacctgcctgcaccacgtagtccaggcggaagtcggcttcgttctctttctggtccgggccaccggcgaccttcgacttgatgtccgaaccgtccaggtaggccacggatgccttcagcccaggcacgtaggccttgaagtcataggtgtactggccaaagttgacctgctcgccggcacgggagaactggccgaccacggcgtcggtgaacagatagaagtcgctgccgccagcgccttgggcgtgcgggtcggcgaggctgccctggttgacccagacgaaaccgccatcgtcacccacgccaatgtggccgagcatcaagctgctgccgcccagttggtaggtgaaggccgcactgtaggttttgttgtcgacttcgccggcgtgtttggcgtagccaccgttgttgttgaattggtagccgctctcgccgttcttgccgtcgctgcggctgtcgaagtagcgcaggtcggtcttgaacgactggtcattgcccagcggcagggtatggaccaggccgacgtagttctgtttgtagaagtcttgcagttgggcgtagtagtactgcaacgtcaggtttttcgcgatcacgttgtcggaagacccaaacggcttgtagtccacgccgccgaacttgaagctgtcgctgtcgcgagtaccaccggccacgctcaggcctgtggagttgctggaggcacggccttcaacgcggttcagctcaccaccggtgaaggtgacgttgggaatgtcgttggaggtcaggatgccgccatcaaaggtctgcggtgctacgcggctgtcgttggacaccaggatcggcaggaccggcgccaggccaccaccgacgtgcaactcggtctgggaaatacggaacttcacattgccagcggcgcgcccgaaggaatcggccggttcagtgccgttgttcttggtcgggaagaaactattgccgttacccgccaggcccgcgcccgccgtgtggccgtcgccaccgtccaggcgcagcgcgccgaaggccatgacgtcaaaacccaggccaacggtgccctgggtaaaaccggatttgtagtcaaaccgcagcgctgtggcggtttcgcgcaaatcgttgttggtccccgagcggttgtccgcgctgtagtacatggtccgcgaactgacggacgcatggctgtcttcaaggaagccgctgtgaccgttgccagtgcccagcgagccgagcccgaaatcatcggcgtaagcctgttgtgcaagaacggcggcggtgatcgacaacgccagtgtagaaattttcattaacgacggcccctaaacatatttttatgtgtgcgatgtgcgtaacggcgttttcatccttgcaaacgtgacgattctttcacgccggccggggcggacttcgtgaagaattagttaggaaaatcgcccgaaaatgaaatttcacgcgggctgatttttgtcatcttcacgtcatctcattcatttgcagaatgaagtcctgaggaatcttcgtttgcaaggcgacgttgcgctcaacaaaatccagcaaaaggccaccatcctcgcccccgccatcaggaatttttctatgcccagcaccgcacaggtcagccccgacgagatccgcaagggcttttccaaggccatgtccgacatgtaccgagatgaagttccgttgtatggcgcgctgatggagctggtggccgaaaccaatgcccacgtgctcgacacccaaccgcaactggcgcaacagctgcaacgcaccggcgaaatccagcgcctggacagggaacgccacggcgcgatccgcctgggcaccgccaccgagctggccaccatccgccgcctgttcgcggtgatgggcatgcagccggtgggctactacgacctgaccccggccggcgtgcccgtgcactccaccgcgtttcgcgccgtgcatgaacaggcgctgcagaccagcccgtttcgcgtgttcacctcattgctgcgcccggagctgatcgaaaaccccgacctgcgcgccttcgccgagacggccctggccaagcgctcgatctttacccccggcgccctggcgctgattgaacaagccgaaaaacatggcggcctcaacgcccaggatgccgacgagttcatccgccaggccctggaaaccttccgctggcatcacaccgccaccgtcaccgccgcccagtaccagcaactgagcgaccagcaccgcctgatcgccgacgtggtcgccttcaaagggccgcacatcaaccacctgaccccgcgcaccctggacatcgaccaggtccaggccgccatgcccggcaaaggcatcacgcccaaggccgtgatcgaaggcccaccgcgccgccactgcccgatcctgctgcgccagaccagcttcaaggccctggatgaacccatcgccttcaccgacgcccaaggcagccacagcgcacgcttcggcgaaatcgaacaacgcggcgtggcgttgacgcccaaaggccgcgcgctctacgaccaactgctgaacgccgcccgtgacgcactcggcgccttccccaacgagggcaacgctgcgcgctatgtcgaattgatggaggaacacttccaggccttcccggacaaccacgcccaaatgcgtgaccagggcctggcctactaccgctacttccccacccagcaaggcttggcggcacgcggcagcgccgatcaaccacgcaccctggaggcactgatcgccgccggccacatcgacgtggaaccgttggtgtatgaagattttctgccggtaagcgcggcggggattttccagtcgaacctgggggatacggcgcagagtcactacgcagccaactcgaaccaggccgagttcgaacaggcactgggccagcgaacgattgatgaattgaaactgtatggcgagacgcagcagcgctccatcgatgaatgcaccgaggcgctgctggcatgaaatgaagtacccacccggctcaccagcgcaatccttgcgccgcaacagtccccagagccgggtgggcggtgggcatcataggcagtgagtgggatgatgtctttcagtcaattctgaaaaaatgtgaacggggcgaacgtgcctgttcactgcgcaataaaacaacgatgctgcagtaggttcccctgcgtgcggcagctatgaccaagccttcattttcctatctatgggcggcgtccagcggagaatcccgtattcccaggcagccttattcaatgcgtttctgcccctcacatagcttgtgattgccgtgtccgtgtacaagcaaccgatcttgatgaatgtgttgcccctgcactcattcgtcgtgagcgtgctgatagcactcatgatctatgaactggcgactcaaaaaaatagtcgcaaggtaacgtgtgtactctcaacctccagacgtaagcccaactgtgcttatcacgcgtgcaatacaaaaatacactgcaaagaacaacccacattaaacccaacagaaaaatactacacgcatttaggaagtcctacatttgctcaatgctggcaacatggcttttactgagtgccattcaggaacgatcagcctccttcccgcccccccaaaacagacactcaacaagcatgcttaaacctatcaaaaacaagaacgacaacttatattacgctttgtctgtcttcatgaatctggacgtccagagaagcttatttgtactttacctactgcaactcggcatcacccagggagaggtaggcattctacagtcgttcttgtttttttcttcagtcgcgctggaaatcccctctggtttactcgcagatcgatatggtcgcaagtgcacgcttatcatcagctttttaggcttgtgtataagtggaattggatttttgctattttcatcttttgttcccttcgcaatcatattctgcctattcggtgccagcattgccatggggtctggttcagacagagcattactgtatgacaacttactggcagaacatcgggctgatgagtaccctaaaatattgtcacgcgcccgtgctattggtgcgatatcgctgagtttgtccatgcttcttggcggtgtcatacaagacaccttgtcgtggaacggagtctatattttttttgcggcatcaaaactcatcggcgcgatcattgtagtattcaactccgaaatcaagcttccacctatttcactaaaccccaacaacgcaaatgaattaaatacgacaaccgcagagggaagctttactttactcatcaaatttttcagctccaacagaggtgcttttctgatacctctctttgttggatatgctctatttgaactctcaaccattcctcttttcatctacggccagccattcttctcccagcagggtctagaaatacctattattgccggcatttacgccacagttgaaatcatatcggctgccatgtttatggttgcaggatatatttgctccagattcacgcttggggtgatagccgtcaccaccaccctcattgtcaccgcactgctcttcaccctatctttgaataccggaacactctcttcagtcgcagtatttattttaatcatgtcactccccgctatctatgaaactgcctacgagacctacatcaatgaaaacatagagtcacgcattcgagcctcctgcctctccgtcgccaatctagtcaattcgatcatcatcggtatctcctacactgtcttcggcgggctgctggatagatatggtttctcgtcgacgttgattgttgttgcaggcgtctgttttatgggtctcttttttgcaagtactaccttactgataagtgggcaacaacgtcgtaaaaagagcaaaaagcttgaatcaatccggtttactgaagatgcgccgtgacaggcccaaagtcgggtggataaatatgtcgataaacctgtaggagcaagcttgctcgcgaagaacccgagaacgccgcgtccactcagggcgccggcgtcatcgttggcgtttttcgcgagcaagctcgctcctacaggaggctcggttgtgatcagcccaacttcgccacgatgtcgtctttgatcaacaagcgtttcttcttcagcttctccacatcctcatcgctggcacttgccgattccgctttcagcaccgccttgtcagcgtcgtcgtactgcgtgagcagcgagtccaggcgtttgtcgctcgccctgcgttcgtgaatgacttccttgctcaccttcaagtcctgatacaagtcgtgtttcactggcatggcgtacctccgcatgttgatcaatggcttacgccctagaagctagaccattgcgaggggtcttgtcatgcgcggggtcaatacagccccgttcgtcgcggcgcgggtgtttggatcaaacctttgcggcgtcctgccctccactctagatagccacccgagggagaccggtttcatgacgcacgctgccaccgctgtcgacacccaatgcatcaacacgatccgcaccctggccatggatgccgtgcagaaggccaattccggccatccgggcacgcccatgggcctggcgccggtgggttataccctgtggagtcgcttcctgcgttaccacccgcagcatccggactggcccaaccgtgaccgctttgtgctgtcggtggggcacgcatcgatgctgctgtattcgctattgcacctggccggtgtggtggagatcgatgccgatggcaagcgcaccggccaggccgccgtcagcctggacgatatccagcagtttcgccaagcgggctccaaaacccccggccaccccgaataccgcatgaccactggggtggagaccaccaccggcccgctgggtcagggttgcgccaacagcgtcggcatggcgatggctgagcgctggctggccaagcgcttcaatcgtgaaggaaacaccctgttcgattacaacgtctacaccctgtgcggcgacggcgacatgatggagggcatcagcagcgaagcggcgtcgatggccgggcatctgaagttgtcgaacctgtgctggatctacgacaacaacaccatcagcatcgaggggcacaccgagctggcgttcagcgaggacgtgatcaagcgcttccaggcctacggctggcacaccttgcacgtgaccgacgccaacgatttgcaggccctgggcacggcgctggaaaccttccacagcaacaccggcgcgccgaccctgattgtggtcgacagcgtgatcggctacggttcgccgcacaaacacaacaccgttgccgcccatggcgagccactgggcgacgaagaaatccgcttgaccaaggcggcctacggctggccgcaggactcgagtttcctggtgcccgacgaagcccgcaatgtgttgcgcgatgcactgctggaacgcagccaacccttgtacgacgcctggaaccagcgcctgtcgcagcttgagcaatacgaaccggaacgggctgacgaactgcgccggatgcgcgccggagaaatgcccgagcactggcaggacgatttgcccgacttcaaccccgacgccaagggcgtggccagccgcgccgccggaggtgaagtgctgaatgcctttgcccgacaaatcccctggctgctgggcggctcggccgacctgtcaccgtcgaccaagaccaacctcacctttgacggtgccgggcgtttcagtgccgacgactacagcgggcgcaacctgcacttcggcattcgtgaacatgccatgggcgccatcgccaatggcatggcgctctcctacctgcggccgtacacctcgaccttcctggtgttcagcgactacatgaagccgccgatccgcctggcggcaatcatggagctcccggtggtctttgtgtttacccatgactcgattggcgtgggtgaagatgggccgacccaccagccgatcgagcacctgacccagttgcgcgcaacgccggggctgctgaccttgcgccccggtgacgcgaatgaaacccgcgaactgtggaaggtggcgctggcacagacccatcggccgagctgcgtggtgctgtcgcgccaaccgctgccgacgctggatcgtacgcagtacgcgccggcatccggggccgccaggggcgcttacgtgctggcaagtgcgggtgcgccccaggtgattctgctggccacaggcagcgaagtcagcctggcggtggcggcgtacgagcagttgaaagaagaagggattgccgcgcaggtggtgtccatgcccagttgggagttgtttgaggaccaggaccagacgtaccgcgacagcgtgttgccgccggcggtgaaagctcgggtcgtcgtggagcaggcaggccccctcggctgggaccggtatgtggggcagaccggcgccaaggtggtgatgaacagctttggtgcgtcggcgccgttggcacagttgcaggagaggttcgggtttaccgtggagaatgtggtgaagcaggcgaaagcgcagatccaactgactcaacagtgatcgaaatgtgggaggggcggtgcgacggttccacttgcccccgatagcggtgtgtcagtcgcatatcagttgactgacacactgtcatcgggggcaagccccctcccacaagttctcatccgcttttagttcagttctttggccaggaatggcgcagtccggctagtcttgcttttggcaaccttctgcggcgtcccactggccaccaccttccctcccagatcccccgcccccggcccgatatcgatcacccagtcactctgcgccaccacgcgcatttcatgctccaccacgaccaccgtatgccccgcgtccaccagttggttcaactggctgagcaggcggtccacatcccgtggatgcagcccggtggtgggttcgtccagcacatacagggtggcgccccgcgcattgcgttgcagctcggtcgccagtttgatgcgctgtgcttcgccaccggacaactcggtcgccggttgccccaggcgcaggtagcccaggccgatatcccgcagcacctgcagcgaacgcaacaccccaggctgttcggcaaacacctccaccgcctgctccaccgtcagccccagcacctcggcgatgctcaagccttgccatttgatcgccagggtctcggggttgtagcgcgcgccgtggcagatcgggcatggcgcgtacacgctgggcatgaacagcaattcaacgctgacaaagccctcgccttcacaattcgggcaacggcccttggcgacgttgaaggagaactgcccggcatcgtagtgacgcttcttcgccgccggggtggccgcgaacagcttgcgcacgttgtcgaacagcccggtgtaggtcgccaggttggagcgcggggtgcggccgatgggtttctggtcgacctgcaccaggcggcggatgtgctccagcccggcgcggatgtggcccccgctggtttgcggggcgtcgtcttccaggcttggttcttcgtcgttttccatcacacgcccaaggccggcgcccaccagctccagcagtgcctggctgaccaggctggacttgcccgagccagaaatcccggtgaccgccgtgaagcagcccaatgggaaatccacgtcaaggcccttgagattattgcgcgtcacaccttccagttgcagccagccggtggcttcacggcgcacctgagtcgacacgcgcttttccgcgaacaggtactcacgggtctgcgacgccgccacctgcgccagccccgccggcgggccgctgtacagcacctgcccaccctgttcaccggccgccgggccgacgtcgatcagccagtcggcgcggcgcatggtttccaggtcatgctccaccacaaacaatgaattgccggccgccttcaagcggtcgagggcagtgaacaacgcttcgccgtccgccgggtgcaggcccgccgagggctcgtccagcacgtagatcacaccaaacaactgcgagcccaattgcgttgccaggcgcagtcgctgcaactcgccggaggacaaggtcggcgtgctgcgctccagggacaggtagcccaggcccaattcggtcaaggtactgacccgctccagcaagtcctgggcgatgcgctgcgcggccaggcgcttctccaccgacagcttcatcttgtcctgccccgccgccaccgggcgcagcaactcggccaactgcgtcaacgacagttgcgacaactcaccgatgtccaccccggcaaacttcaccgacagcgccgcctgggtcaggcgcttgccgtcgcacagcgggcaggcgctgccctgcatgaactgcgacacgcgctttttcatcagcgcactctgggtatgggtgaacgtgtgcaggatgtagcgccgtgcgccgatgaaggtgccctggtagctcggctccagtttgcgcttcaacgcatcgcgggtctgttccggggtgaagccggcgtacaccgggacggtgggggtctcttcggtaaacaggatccagtcgcgctgctttttcggcaggtcgcgccaggggatgtccacgtcatagcccagggtcaccaggatgtcgcgctggttctgcccctgccacgccaacggccaggacgccaccgcacgctggcgaatggtcagggaaggatcgggcaccatcagcgcctcggtcacttcatacacacgccccaggccatggcactgcgggcacgcgccctggggcaggttcggcgaaaagtcttcggcgtacagcatcgcctgccccttcggataactgccggcgcgggagtacagcatgcggatcaaactcgacaacgtggtcacgctgcccaccgacgagcgcgcactcggcgtgccgcgctgctgttgcagggccacggcgggcggcaggccttcgatgctgtccacgtccggcacgccgacctggtcgatcaaccgccgcgcatagggcgccaccgactcgaaatagcggcgctgggcctcggcatacaccgtggaaaacgccagggacgatttgccggaacccgacaccccggtgaacaccaccagggcatcgcggggaatatccacgtcgacgttgcgcaggttgtgttcgcgggcgccgcgcacgcggacaaagccggcgggttgggcagtgatcggaggaatattgcgctgtgaagtcatggacaaccttgtcgggcggtgagcacgctgcgcacccgttgcgtcagcgcttcggggctgtagggtttgctcagcagatgaatatcggggctcagcaagtgattgctggagagaatgtcacgggtgtggccggacgtgaacagcaccggcaccgcaggcgtctgctggcgggcccagtcggccaggtcggtgcttttgacgcggccgggcatgaccacatcggtgaagatcaggtccggtggcgagcctgcctgcagtttcgacatggcctggtcaccgtcttcggcggtaagtacggtgtagccggactgttcgagcagctccacgacagtcaggcgcacaccttcattgtcctcgaccaccaggatggtttcctgtccgccgctgtgctgcacctggtccatatgcacatcgaggctttccggttccaggctgtgggggaaatacatctgcaccaccgagcccttgccctcctcgctccacatttccacatgcccgccactctggcgcacaaagccgaacaccatgctcaggcccaggccggtgccatggccttcacgcttggtggtgaagaagggttcgaaggcgcgcttgagggtggtctcggacatgccgacgccggtatcggccacctccaggcgcacatactcgccgggcttgatgcttttgcccgcgcaatcgtccgggttgaggatgatgttttcgccggagatgcggatcaccccctcgcccttcatggcgtcgcgggcattgatcgccaggttgagcagcgcgttttccagctggttgcggtcgacgttgataaaccaggcatcctggggcatctgcacatcaatgtggatggtctcgcccagcgcccgttgcagcaactcgccaagcccggcgtaaatgcgttgcgggttatacaccgccggcgacagcggttgacgccgggcgaacgccagcagttgcgacgacagcttggccccacgctccaccgccgcaatggcggcggtgacacgccgctgcacctgggcgttgttcggttcctggcgggccagcaggtgcaggttgccggcgatcacttgcagcaggttattgaagtcgtgggccacgccgccggtgaggccgccgatggcttcgagtttctgcgactggcgcaactggtcctcggccgcagagcgcgcctgcacttcggcggccacccgttgttcgaggttgtgcgtgagttcccggcgtacttgttcggatttcaccagctcggtggtctccaccacaatcgccagcacgccggccggttgttgatcgtcgccggccaccgggctgtagtagaggtccagccacacggtttccggctggccgttgcgcaacagcaccaggtccttgttattgaatgacagggtgccgccggccaggcaggtgtccatcacatgccggttgaactcggccacttccggccaacccaactccaccggcgtgcccagcaggtacggatggcgcccgccggcaaatgccgagtagctgtcgttatagatcatgtacccccattgtccccagagcatcaccatgggcacgggtgaagccagcatcatctgcacggtacacgccaggctggtggaccagcggtcgatggggccaaggtcggtgctcgaccaatcgaatgcgcggatccgctgggccatttcaccggcccagccttcacagccgtgagggttggataagaattgcatggttggctctgtgcgcaaaaagagaacgtcggcaagttttggagcgctgtagacccggatgggttcaacccatctgcatcagaggtcattacagcagaaaccacgggggctcagtgaaaatcccgactgcgcacattgatcccttccagcaacggcgtcaggtcggtcaggcgcccggcgatcaagtgccgcacctcgcccaccgcttcccagcgcccgtccaccttcaatagccgcgaacccaccagggcctggcgttgacgctcggccaggtcgcgccagaccaccacattaaggttgccgaattcatcttccagggtgacaaaggtcaccccactggccgtgcccgggcgctgccgaccggttaccagccctgcaacgctgacattgcgtccatgttccaccgccatcagttcatgggagctgcggcagcggcgcttgcgcaattcatcccgcagcaacgccagggggtgcggcccaagggtcgtgcccacggtggcatagtcggcctgcaggtcctcgcccacgctcggtgccggcaactcgaccagcgcttcatccgggctcggcaggccggcaaacagccccagttgcttgtgcaccccggccaccgcccagcgcgccgtgtgccggttgtcggccagggcgcgcaaggccccggcatccgcgagcaaggcctgggcacgcgcatccagcccggcgcgctcgtcgaggtcggcaatgttgctgaacgctcgacgcaggcgcgcggcttcgatgcgccgcccatcttcttcgcgaaacccggagatcatgcgcaagcccatgcgaatcgccggttgtgcaccatcgatgggctccaggctgcaatcccaatcgctggcctgcacatccaccggccggatctgcaagcgatggcgccgtgcatcctgcaggatctggtccgggctgtagaagcccatgggccaactgttgatcagcgcacaggcaaacgccgccggttcatggcacttgagccagcaactggcgtaggtcagcaaggcgaaactggccgcgtgggactcggggaagccatagctgccaaagcctttgatctgctcgaagatctgcgcggcaaaggcttcggtgtaaccgtttttcagcatgccggtgcgcaggcgctgctggtgcggctccaggccgccgtggcgtttccaggcggccatggagcggcgcaactggtcggcctcgccggggctgtagtcggcggcgaccatggcgatctgcatcacttgctcttggaacagcggaatgcccagggtgcgttccagaacggttttaagctccggcgaaggataggtttcgggttcttccttgttccgccgccgcaggtacgggtgcaccatgccgccctggatcggccccggtcgcacgatggccacctcgatcaccaggtcatagaatttctgcggcctgagccttggcaacatcgacatctgcgcccgcgattcgatctggaacacgccgatggtgtcggccttgctgatcatcgcgtaggtggccgggtcttccttggggatcgtcgccaaggccaggtcgcggttgcggtggcggcgcagtaagtcgaagcaacgccggattgcactgagcatgcccaaggccaggatatccaccttgagcaagcccacggcgtcgaggtcgtccttgtcccactggatgatggtgcgctcggccatggcggcgttttccaccggcaccagggtgtccagcgggtattcggaaatcacgaagccgccagggtgctgggacaggtgccgagggaagccgatcaattgctgggtgagcgtgagcacccggcgcaacagcgggctgtcgggatcgaagccgccttcgcgcaggcgctccagcggcggggcatcgtcgctccaacgcccgcagcagtcggccagggcgttgatctggtccggcggcagcccgagggccttggccacatcgcgtaccgcgccggcggcgtggtaactgctgaccaccgccgtcagcgccgcgcgggtgcggccgtagcgctggaacacgtactgcagcacttcttcgcggcgctcatgttcgaagtccacgtcgatgtccggcggctcgttgcgctccctggacaggaagcgctcgaacaacaggctcgtcaggctcgggtcgatctcggtgatacccaaggcaaagcacaccgccgagttggccgccgaaccgcggccctggcacaggatcgaacggctgcgggcgaactgcacaatgtcatgcaccgtaaggaagtagctttcgtagcccagctcgctgatgagcttcagttcggtgttgatctgctgcaaggtcttggcgtcgacaccctgcggccagcgttgggcgatgcccgcttcggtcacggtgcgaagccaggattcggcgtcgtggccgctgggcaccagctcacgcgggtagtgatagcgcaactggctgaggtcgaaggtgcaacgccgggcaatcgcctgggtttcatcgagcaaggcgtgcgggtacagcgcggccagggcatcaaggctgcgcaggtgccgctcgccattggggtgcaggcgcgtgccggcttcggccaccggcacgtgatgacggatagcggtcatggtgtcttgcaaggcacggcggccacgcgcatgcatgtgcacatcgccacaggccaccgccgggatgtgcaggctggcggccaggctcaagcgttgttccaggtgacgcgcatcgtcctggccgcagtgcaggtgcacggccagccacaggcgcccggcgaaggtgcggcgcagccactggatcgaggcctgggtgtcgccgtcctcggcgacccacagtgccagcaggccgggcagcggttgttcgaagtcctcgcgcaacaggcgatagtggcccttttccgcgcgccgccgggccacggtgatcaagcggcacaggtgctggtagccgctgaggtcttccaccagcagcaccagcttcgggccgttctcgatgcgcacctcgctgccgataatcagcggcagttccaccgccttcgccgcctgccaagcccgcacgatgcccgccagggtgcattcgtcagtgatcgccagggcgctgtagccttggcgcttggcccgctcgaacagctccagcgcactcgacgcaccgcgctggaagctgaagttggacaggcagtgcagctcggcgtaattcatgcaaaccagccttgcagccacaacccatcgctttgcccgacgttacgaaaggcccagccttgctggccggcgcgggtctggatcaggtagtagtcgcggcggatatcggcgccgtcccaccagccggactcgatgcgctccggccccatgaggatgtgcacaccgtgctcggccaagagggtgggttcgctcagcaaccaaccggggcgttgcaccttgtgcaaggtcgggcatgggcttttatcggtcgctgtttgccaggcgcattcggggcggtggtcggcgtggaagcgcaagccctgcacggcctcatcgcccaggcgtgcacgcaggcgttcgcgcaactgttcccacggcaaggtctgttgcgggcggtcgtcgaacaggtcctggcgctgcggcacgaacaccggcaaatcctgggcgaccaggcgaaagccgcgtaccggtgaggtgacctgtacctgctccaggcgaccccgggccaattcaaacagcatcgccggttcacgctcggcgctgagcaggccgaccttgatcagcgtgtccggcgcctgggcgtgttccaggtgcaagtcaaaacgctgtacgccactgtcacggccacacaggaaggccgacagatcgcccgtcaggcgtcgcaaaggaaacagcagcgcctgatgggactgcacgtcgaaattcagctcgatgcgcacatcgaaccggtccggaggctgatagaacgccaaggccaatgggcgctggccggtcaacgcatccaagtgcttgagcaggccggcatcaaaacgtcgcgccaaggtgtgccgaggcagcgcctgcacctgggccaggcggcgcaggcccatgcgcgacaacgctgtggcggcctgcgggtcgaggccggcgcggtcgatgggcagcggcgccagggcctgcagcaagccgtcatcctgcaccgccaaaccatcgtagatattcgccagcacccgcgccgccgccgggttgggcgccgcgacgatacggtgacgaaagcccaattcggtcagctccttgcgcaagcgtgcttcaaaccgcggccacggcccgaacaagcccaggctcgattcgatttcaaacaacaaggcacgcgggtaatacaggctgacctgggaactgaactggtaggcccaggcagccaggaactgttggtggcgctcgatctcggcggggtcgtattcgacgctggcaaaggtcttggccagggcatgcgccgccgtcagggattggcccgggcgcaggcccagggcgtgggcggcgtcattgacggtttgcagcacacgccgctgtggcgtgccggccagcagggccaggggttgctccggctcgggatgcacacgcagcactccgtccagcgccaattgcgggaagacaatacacacccagcgcatgacaacctcagtgccccgccagggcaatcggcgccggatgggccaagccgccccggcacttgagcacccgtacctgcgcgggcctggcctcgacggccaggcgtagcgcggcgggcgatgagttgaccgactcactcaaggcgcgccaggcaaacgccagggtctgcccggtttccgccgccacttgcaggcgccgcagcgcccggtcatcggccttgcgcggccagcacagcaccgcgccgcaactgccggaacgcaggcattgctccaccgcccacagggcgtcgcgttcctcggcctggatcaccgagagcaggcgcaggtccactccagcgttctgccaggcatgggggtacggcgtgtacggcggcgccaccaacacaatgcgctcccccgccttcgacaaacgcgccagggtcggcagcaccagttgcaactcgcccacaccttccttggccatgaggatttcactcaatgccgcctccggccagccgcccgtgggcagcaccgcgtccaacgccgccagcccggtagggtgcacgctggacggcggcgcggcaggccggcccttccagacacgcccgccattaaacagcgtgtccagcgcaaccacggcgcccatcagccttgcctcaccaaaccgcagaacaccccttcgatggccaggtcctggtcaggccccaccacgatgggttgatacgcggggttgcgcggcagcagacgcacgctgtcgccactgcgctcgaaacgcttgatggtcacttcgccgtccaggcgcgccaccacgatctgcccgttcaaggcctcggcactgcggcgtacgccgaccagatcaccgtcgagaataccgtcctcaatcatcgaatcgccctgcacgcgcaacaggtagtccggggttttcgcgaaggtcgacgggtccagttgcaggcgactgtgcacttcagcatcggcgccgataggcaaacctgcggccacgcgaccgagcaccggcacatccagccattccgggcgcaccggctggttgagcaggcgaatgccacgcgcctggtgggggttgacctcgataaacccggcttcggtcagcgccagcacatgcttgcgcgccacgctgcgcgaggcaaaaccgaacgcctcggcgatctcggcgaggctcgggggctggccttgctgcgcgatgcggtcgcggataaaggtcaggatggcggtacggcggggggtgagagtcgtcatggagtacatttgtactcctgtgggaaatttctgacaatagccgctagtcgcgcgatagcggacaagcgttatcgaaccgtcccacataaccgccggataagctctactcccctgccctgcaaacgcccgcaaagtccgtcgcctgactacacagtgcgagggattgcagatggcgttatgggtttgggctccggtggatggggctgtttcatgatcgaagtgaccagccaaaccattggctatttggtactggccaccctggattcaaagacgcgagacgtcgaatccgttatcagcgacttcaagcgctgcctcaatcactacgacgcctgggcttcgagctttttcagcttttcggcgctggatatcgaacaggtcttcaaggtgggggatgaagtggcgctggtcgcgccgatcaaccgctccctgtttcccagcacaaccaccgcaacctgccgggcagacggcacgctgaccctggtgcatatgttccagagttctcgattcgtacccatcggcgatacgcccgtgatggtgcagcgcatcgatccggacggtggcccgctcggggagcccctccataaaaccatcggacccagcggcattctcgaaatcaaggaatgtgatcgcaaccagcagtaccgggtcagtttctaccccaacgtttccaaggcgcacttcaaggcgctgtacgcctcttaccagtcggttatcgaaccgctggaaggctggttgcgccgtgagtggaccaccaccttcgccgccttatggatgggttattccgaagccaactttctcaagcgctacctctcgctgcaccaagcctacgcacgcgggttcagcggggcgttgtattcactttgggacaacatcaagcagatgcttcagtggtttctggacccactgaagcatgccgaaaagctactgcattacctgagccaggaagaattcgaaaagctcttgaagcttggcaccgaaagcatcgcaaagggcctgctggtgctgagtgatgagccgttgctgttcatttatctgtcggcaatggtcagttggatgcggatgttaccgccgccctatatgaatgagctgctgggggaaatcagcgctgaagtattgatcaatttgctgctgtgccttgccacggccggtatggggatggcggtacgcatcagtacgaaggtgctgggcagcatcaagtctcaacgtgtgcgcacatggcttgagcacatggctgggcagttcgggaaatttcgtgcggatgatcacacgcaggtggccaagccgatattgctcagtagccaggcgacgacgatcaagacgattccggatgcgcccttgaaggctggggatcaggtggttgccaacgcggtgccggtggttcgggataaggccacgcagcggacggtgctggtgcggcaggagcctgtggatgatgtgccggcttctgctcgaaacccgaatggggatgcggcggcgcctgcggacaagaccgccactaacggctgcccggtgtcgatggtcaccggcgaggaattgctgacccttaccgatgggacgctggacgggatcttgccgtttgagtggactcgcttgtaccgcaccagtgcggtggaagtggattgcgggctggggtttggctggagtcactcgctggcgcatcggctggtggttgagggtgattcggtggtttggaccgatcatgagaatcggtcgaccaccctgcccttgcctactgcctctcgacctgcgatcaccaatagcctggccgaagcggcgatctatttgggtgctgcgcccgatgaactggtgctggcgcaggcgtcacgtttctaccacttccgcgacggtgtgctgacggcgatcagcgatgcgtatgacaaccggctgcgtatcactcgggattttctggggcgtgttgagcgggtggataacggcgtcgggcgctcgttgtggttgcgctatgtgtcggaccggattgtggcggtggattaccagattcatcgcgtcgtggatgacgggccgtttgtttgggtgacggagcagaccgttgtttcctacgcctatgacgacttgggacgactggtttcagcgaccaatgccgtcggtgaaagcgaggtttatcggtacgacgaacagcacatcattcttgagcgcggcttggccggtggggcgagctttttctgggaatgggaacggtctggcaagacggcgcggagtgtgcggcattgggcgagtttctcgcagatggacacgcgctatgcctgggatgacaacggccaggtcacggtgtttaacgccgatggcagccaggaagtctacgtgcatgaccagcgggcgcggctggtgcagcgggtcgatccagacggtgccgagcatttcaaatcctacgatgaccaaggccggctgaccgttgagcaggatccgctgggggcgatcaccgcgtatcagtacgacgaagccgggcgcttggtggcggtgtttccgggggacgatgagccgacgacctacgagcatgacaacgggttcgtacgggttgtgcggcgtggtaaagcggtttggaagtatgagcgcaatgaccagggcgatgtaacgcgcaagatcgatccagacggtcacgttaccgattacacctacaacaaatatggccaactgattggggtttggtacccggatcacagctgtcagcggctggtatggaacgagcacgggcagttgcttgaggagcagttgcccaatggtgggatcaagcgctatcgctatgacgatctcgggcggcagattgcacgggaagatgaacacggcgcactgacccagtatcagtgggacagcgtgggtcaactgattcgcgttgtgctgccaggcggcgagttcagggaatacagctacaacccctacggaaaaatcaccgccgagcgcgatgaactcgggcacgtcacccgctacgaatacgccgacggcctgcacctgatcagccgccgtatcaatgccgatggcagccaggtcaactaccgctacgacaacgcgcggttactgctgaccgagatcgaaaacgaggtgggcgagacctaccggctccagtaccacagcaacggcctgatccagcaggaaaccgggtttgacggtcagcgcaccgcttacgtttacgaccttaatggcaacctttcggaaaagaccgaacacggcgatgacggcagtcagttggttacccgctaccagcgcgattacgccggacgcctcgtcagaaaaaccctgcccgacggtggcaaggttgattacacctacgaccgccagggcaatctattaggcgtcgaagacggccactggtccctggcctacgagtacgacagccaaaaccgcctcaccgccgaacaccaaggctggggcacgctgcgctacgcctacgacgcctgcggccgattgcaaaacctgcgcctgccggacaacaaccgcctcaccctcaatcacgacaaaggcggccacctcgccaccgtcgaactgaacggcgttgtacttacctcacacctgttcaaggcaggccgcgaacagcaacgccaacaaggccaactgctcagccactaccaacacgaccaccaaggccgcctgttcaaccagagcatcgttgatgccgaaggcccggtctaccgccgtcactacgactacgacaaatccggcaacctcacccgcctgctcgacacccgcaaaggcgaacaccgctaccactacgacccactcaaccgcctcacccgcgccgaccactcgcaagacgaacaggaacgcttcggccacgacccggccggcaacctgctcatgcacaaccgccccggccccgacatcgtcgccggcaatcgcctgatgatccagggcgaccaccattactactacgacgccttcggcaacctgattcgcgaacgacgcggcaagggccatcaactcgtcaccgaataccgctacgactgtcagcatcgtctgatcggcgttaagacgcccaacggccagactgccagctaccgctacgacccgtttgggcggcgtatcagtaaaaccgtagatgggattacgaccgaactcttctggcaaggcgacaaactcattgccgaacaccacgccaatcggcaccgcagctacctctacgaaccggacagcttccgcccgctagccttgctggaaggtttcggccccaaggaaacccaggcctaccactaccaacttgaccacctgggcaccccacaggaactcaccgcccaggatggcgaaatcgtctggtccgcgcactatcgcgcctacggcgaaatcagccgcctcgacatcggaaaagtcgacaatccgctgcgtttccagggtcagtatttcgatcaggaaagcggactgcactacaaccgccatcgctactacaatccggatgttgggcgttacctgacgcctgatccggtgaagctggctggcggaattaacacgtacctgtacgtgcctaatcctacggggtgggttgatccgttagggttagcctgcaaatcaacgaactgcccccaactgatcaacgctcaaaaatgggaattgaaacctgctgttgatctggactggcgtaatcaaaacggtagtgcctatgagcaaatgcatattggtttagatgaagcttttcgcaggacagatatacctaaggatgaatacagcgtcacgaagtggggtaaagaccaatatggaaaatcttttccaaccgaatggagggttgaaaatggaccaaaaaaaggagcggaagtcaacatagatgaccctacacttgtttttagcaagaaaggtccacaatcaccacatattggctaccaaactccaggcaaaagaaccggtggaggagcagtaagaggacatatattgctcaacctgctcccagttagccgttcaaaaataggggaaaactgatgaattatctagaagcagaaatagacgaagtgctcagcacacttagtattaaacataaaaaacttacaacagaagagattagctcattaatcaaagcattaactagacgttttttcacaactgaaaaatccacacttgaccctatggacttcaatgagacaaatgccgagtacaactcgaatttctggaaagaaataacgagacacataaagaaaacagatctaacactaatcgtttacgatacaaactatagagcatggcaaataaataccccacaggacattgaacttcttataggtgaaacaactggctatccattctggctaaccgatcgcgccctaacatttttgatccacttggacgaccatgactgtgtaagctcagcagaaaaagaatgacaagtactcagcaacagaaacaccgccaccgaccgctaaaacttcggacattaggcccccactcgagaaacacacacccaagcaaaattaaataaattaattttccgaaaaagaaacacctgaaatacttatagaatcaaaccccacttttagttctaggtaaaaagggcaattactatactgaaatccttgcaatgatatgaactactaccccccaatccaggcgaagaaggttttcaggtaaatcggctacggctacgacgcctgcggccagctgcaaaacctgcgcctgccagacaacaaccgcctcatcttcaatcacgacaaaggccacgccctcgtcaccgaataccgctacgactgtcagcatcgtctgatcggcattaaaacgcccaacggccagaccgccagctacctctacgacccgtttgggcggcgtatcagcaaaaccgttgatgggattacgaccgagttcttctggcaaggcgacaaactcatcgctgaacaccacgcggatcggcaccgcagctatctctacgaaccggaaagcttccgtccgctggcgctgctggaaggttttggtccaaaggaaaccaaggcctaccactaccaactcgaccacctcggcaccccgcaggaactcactgcccaagacggcgaaatcgtctggtcggcgcattaccgtgcctacggagaaatcagccgagtcgacatcggaaaagtcgacaacccgctgcgttttcagggtcagtatttcgatcaggaaagcgggctgcattacaaccgccatcgctactacaatccggatgttgggcgttacctgacgcctgatccggtgaagctggcgggtgggatcaatgcgtacttgtacactaccaatcctacgggctgggtagacccaataggatttgcctgcgcgcgcggtaattgtccgggacaaagaagcaaattaaaaaaaccacacgagaaagcgccccctgaaataggagatgtggttcactctgtcacttatgaacaggctttaaacaaagctctagtgtggttattagaaaataatttccgggcagaaataccaaagccaggaaaatttggaaaaagaaaaggggatcccataggaatgcaaacatccgatagacaaactggctatcgtgttgaatacgaccaaaatagtggcgcacatatcaatgtatggacccataaaaaaaacggcccacattttacatttgaaggagacgaaaaattggtgatccagctaattaaaaggtttgcaaagaaatgagctatcttgacgatgaaatcattgacgacttcaaaaaaatcaacataaaaatcaccatcctaacaaaagtcaaacatgacctcatggtagaaaacatcagtcaaaacatcccattctccgtaacaaatatcgcatggaacttattgaaagatagtatctatctgggtgtagcaacatcacaaacgtcaatggatgcacttgcagaaaaaatcacacacaccacaaaagcggacatcattattataggcgacgccaccgatgaggcttattcaataggtatcaagcagctctccccagcattgagaatattttcgacgattccgcagcatacatacataactcaagaaagcttagattggatagcaggcatatcttttgaaggctatatatatttttgcaaactccaaccccccaaaaacacaatccgacatcaagaaaaaaccgagtaaaaataaatgttccaaaacacatgctagaaaaaactgaaatccaaggattgctgcgtttacctatcgaatatatacatcgattttgattgcgggcctgatgatagggtcgacggttttgacctctggcggttatatgtttacacatgttagctgccgcaaaaatacaaaaagtacaccgacaaagaatacctggcgcatgaattcgatgaatatttgaaactgggcaaagccaagaaaatcccaagctccatgtccagtctgtacttcattcagcaatgaacatgactgcccagcctgatgagcaatcaggccctcacccccacgccaccagcaacaaccccagccccaacaccaaacacaacggcgaataaaaatacgtataccacctcgagaaccccgctgcgcttccagggccagtatttcgatcaggaaagcgggctgcattacaaccgccatcgttactacaatccggatgttaggcgttacctgacgccggacccggtgaagctggcgggtgggatcaatgcgtactagtgcgcgcccaacccggaattattgagcgctacacatcgggcccaaacacaggggaacctaaatacccacccgctgcaacacattatctcgtatgcgatccataaaccccacctgcccaacagcaggttaacggtttaccgtggcatctctggcgagcagttccatggcagcagtgcttcgtagtcctctactgccgaggcatgcggcagcctctccagtacgtggcgcagccacgtatagggctcctggccgttgaccttggcggtctcgaccagactatagatctttgcgctggcagtggcgccgttgacggtatcgctgaacagccaggccttgcgcccgatgacaaacggcttgatcgctctttcggccgcgttgttgtcgatgggcagataacccgcttcgacatagcgttccagtcggctccagttattcgccaggtaatgcaccgctttgcctaatgcactttgtgccatcacctgcggctgggttttatccagccaggcttttaactggcccagaatcggcaggctcttttcctggcgaccgataaaccgctgctcatcactcgcgtctttgagttcacgctcgatcccgtacagcttgttgaccattgccagcgcgatatcggcccgtccggttttacccttgggctgcactttttgcgcatccacgaacttgcgtcgcgcatgagccatgcaggccagccgttccacgcccggttgcaaggccaaggcgttatagccggcgtaatcatcggtcatgacataaccacgataactttccagcaggcgcagcggcacgtcctgcgcacggctggaggtgtagtcgaacagtacgactttacgatcaggcgggccgctggcttgcacccacatccaagattggctggtcgggtctcgatccggttctttcaacacctggacgcgggtttcatcacagtggatcaccgggctttccagtaatcggtcgcgcatcaaattaagcagtgactggaagtgctcgctgcactggatcacccagcgggccagcgtttgccgaggaatttcgatgccgtgtcggctcagcacgctttcgaaacggtgcagtggtaaaccgtcgacatatttcgtggtcagcagcatggccaatacgcttgggctggccatgctcttttcgatcagttgtgcgggtttgtcagccgtgacaggggctgcttcgcagccccggcaaccgtagaccttgcggatatgtttgatgacccggatctgcatcggcacgatatccagctgctcgctggtttcttcgctgatcacatgcttgcggcaaccgcaggcacaggtctgttcgtgttcgggtagttcgtggatcacttcgatacgcggcagatcggccgacaatggcttacgtttgccacggcggggtgtcggctcaacgacctcttcatcagcgtcgcccactaacgacatgggttcgctttcaggttcgttgaacaaagccagttgcggcgtattgggctcaacggtttgctcggacttgcgcccaaacagacggtcacgcaacagcttgatctgttctttaaggtcgacgatgtgggtctgataagcctgagctgtttcgtcctggcgattgagtgcctcaagcagcaattgcttgagcaaaacaggatcatctggaaggtcgtcgggcaaagaaatcatggcccggattataccgggtcacgccacgtagcgcggcgtcaaaacctgatgagggcggttgcgccagaggtcaaaaccgtcgagcagccagttcagctcctggacgctgaggataatcgctacgtccgtgtcatcgggggatgttttgaaacgctcggattccaggcgcttgagccaaagacagaagccgttgcgttcccaatacaatatcttgacccggtttcgggatttgttgagaaagacgaaaagcaccggatcgaagaccgccacttttatatccagttcgaccaatgccgcgagaccgtcgatggattttcggaagtcgacgggcttggggtagaggtacactttttcgactttggcgtcgggacgcatcatggcgaatgggctcctgaaagaaatcgggagcacagcatccgggatcacgtggcgggtttgaatgtggggttcatggagcggttacattatctcagccatagagatcagttaaactcgatataccgagcccagcttatttttagacgaaacggacacacttcatcattagaaccaatgaatatgggaaaatttgttggcgaaggatactcaagagaaggaatagaatatagccaacaacgtaaagcaagggtgatattaaacaaccaaggccacccaaaaactgcatacacggagaaatgactaaaatgaaaaataagcctagcatgtcaataatccgtggactactgttcacttacgacattgaaaacactgacgacttagagcgagaagaactaattgcatcaaaagacgtaaataatgaaaaagaactttccgatctttttgacgagttaaccaaaccagaatttctcgattatacgaggagtgagcaggagtggttcattgcctcgatcacacatttcttagccatcaatgacaattttgatgcgattttcaaaagcatggcaacctatttcagcgcacccgtaattaatcagaggaagtttatgcaggtcttattgagatgtttaaaaaactactacgactcgccaagatcggagaattaagaaaacaagcgcatctggcttctgcctgggtaggtatcgaagaattctaataagccagcctcgaagactggtcaacctggtaacccaaacaccgccctccaaggcaacaccgcccctctgtggcgagcaggcttgccctgcgttgggccgcgaagcggcccgagtccaggcgatgggtgttttcaggtaacccggcattgtctgttttggggctgctgcgcagcccaacgcagggcaagcctgctcaccacaggaaggctgcgaaccacaacaagcgggttcacccaaacaaagggggctcaccaaccttccttgagcatgcgcaactcaagatgctgcaacaacatgatggtcttcccatccacaatctcgccgttctgaaccattgccaaagcctcttcaaagcccagctccagcacttcgatatcttcgccctcctcttccaagccaccgccagtcccaacccgatcacccggctgatattcacccatgaaaaagtgaatccgctcggtcaccgagccggggctcatgaacgctgcgtagattttctcgacatggccgacgcgatagccagtctcttcctcggcctccaggcgaatgcgttcttcgggactggcgttatccagcaacccggccgccgcttcgatgaggtagccatggtaatcgttgacgaacgtcggcatgcgaaactggcgaatcagcaacaccgtacgctgcacgcggttgtacagcaggatggtcgcgccattgccccggtcgtacacctcgcgggtttgggcttgccagctgccgtcgcggcggcgcaggtcgaagctgtattttttcagcaggtaccagtttttcgaaagggtctcttcagcggtgatgcgcacggggctatcagccatggtcgttttctcaagaaagggaatgtgtctgtttgatgcgatcccaggcagcggcgacttcttctgcgctgctggccttgatccgcgccagattacgcggatattcaaccccggggttttccgtaaaccgcgtggcggtgaattggccgttgctcgcgcgcaggatgtagccggtgtcttcacactgcgccgacgccaggtacaccccccctggcgtcacccactccggcttgagttcatccggctcgtcagtcacgccccacatgcgcgtcttcgccaccggcgagattgcattgactttgacgcccgcctccagcccctcatggctcaacgcattcatgatccccagttgggccatcttgccggcgctgtaggccaccaggccggtttgctcgtactgcgcgtacatggcgcggtcggaggtggtgaggatgatgcgcggcgcgggtgaacgcagcaggtgcggccaggcgtgcttgcacagccacagcggggcgtagaggttgatgtccatggcacgctgcaggaacgtggcgtcgaggtcggtgatgttctggtaacccacccagccggcattgtgaatcaggatatcgagttggccaaagacctcgagggtgtacgcaaccaactgccggcagccctcgttcgtggacaagtcgccgccgtgaccgatcacgtgcaagccttcggcctgcaacgcctttgccgccgcctggacgaccgttgcatcgctgcctgcgcccgcgctgtcggcgccgatatcgctgatcaccacccgtgcaccgccctgggccagggcccgtgcgtaacagagccccaacccgcgtgcgccgccggtgacgattgcagtcttgcctgtgaaatccatgtgcttgctctcctgttcggcggcccaccctaacaatctctgcacgtattgttcaatgcagtaacactttgtaagaaacacccatgggcggctgtcgaattaatacctgcctgggcaagccatctggtaaaacccctgcttgaccttttacctggaaccttcatgtcctcacgttttctctcgcgcctgagcctgcgctggtttcccctggtgtgcatggcgctgttgatcgtcggcctgccggtgggctgtgccgtgctgcaacacaaggaacgcgaactggtgtttcgcatcgagccgggcaccgccagttggtacagcggcttgcccaaggcggtgcaggaattcgagctcaagccggccagcttcaaatcggggcagaatatccatggctggtggtacccggcggacaagaaagatgctcccgcgatcctctacctgcacggcgtgcgctggaacctcaccgggcagctgtttcgcatcgagcaactgcacgccctgggttattcggtgctggccatcgactatcgcggtttcggccagagccacggcgagctgccgtcggaaaccaccgtgtacgaagacgcacgcatcgcctgggaacgcttccaggtgctgcaacccgacccacagaaacgcctgatctacgggcactcgctggggggcgcggtggccatcgacctggctgccgaattgggcaaacagacaccgttgccggtgcgtgggctggtgatcgaatccacctttacgtcgctggcggatgtagccaccgccgtggcgaacacctcactgccggtgcgttggttgctgtcgcagaagttcgattccatcgacaagatcgccgacatccatatgccgctgctggtggtgcatggccttgacgaccgctatgtaccaccgcgtttcagccagcagttgtttgaagccgcccgggagcccaaacggctgttactggtgcccggtgccagccacaacaacagcatgagcctggccggtcgcagctatggccaggcgctggacaaattgatgcaagcgaagatgccggcgcaggttgtcacccactccacaggccgcaacggcgactcgtaaaaacgtttttcggcactgggttagcgcttgcctgtcaagcgcaaacccagcccatgctgggccaaatccgaagttgatcaaatattgatcttggcttaaatcgccaaccctgccggggcttcgcaaagttatccacagagatacccacggttttcgtggacaactctttttatttttttacgttttttttgctcagaaaaggttttccgggaatgtccccggcaacaaaatctcgcgattcacatcgcgtatatcgttatacccacacagcgccatcgtcacgtccaactcacgggcaatgatctcgagcgccttggtcacacccgcctcgcccatcgcccccagcccatacaaatgcggccggccgatcatcgtacctttggcacccaacgccactgccttgagcacgtcctggccggagcgaatgccgccgtcgagccacacctcgatacgctcccccaccgcctccacaatcgccggcaactggctgatgctcgacggggcgccatccaattgccgtcctccgtgattgctcaccaccaacgcatcggcgccggcattcgcggccaggcgtgcatcctccacatcgaggatgcccttgatgatcagcttgccaccccagcacttcttgatccactccacatcatcccaactcagacgcgggtcgaattgctgggcggtccaggacgacagcgaactcatgtcggccacgccttttacatgcccgacgatattgccgaagccgcgccgtttagtgcccagcatgcccatcacccaacgcggtttggtggccatgttgagaatattcggcaacgtcagtttgggcggcgctgacaggccgttgatcaagtccttgtggcgttgcccgaggatctgcaggtcgagggtcagcactaatgcatccacgccggcggccttggcgcgctcgatcaattgctcgataaaggcgcggtcgcgcatcacgtacagctggaaccagaacggctggccgacgtgctcggcgatgtcttccagcgaacaaatgctcatggtcgacaaggtatagcgcaggccaaaggctgcggcggcgcgagcggtgagaatctcgccatcggcatgctgcatgccggccaaaccggtcggtgccagcgcgacgggcatggccatatcctggccgatcatgctggcgcggatcgagcgctcgtcgatattgcgcgccacccgctggcggaacttgatgcgggcaaagtcgctttcattggcgcggtaggtgctctcagtccaggagccggaatcggcgtagtcgtagaacatgcggggcacacgtttttgcgcgagcttgcgtaaatcttcgatggttgtgatcaacgacatctaggtcacctctccctggactgaacgctgagagtaaccgcccatcgcgcgcacaaccagccattgcgtttatagcccagggcaattaatctcgcacaaacccgcaaaaagacgcaaaaccatgcacaacacgcatcaagccatcgacctgccttccttgcgcaaacagaagattttgttgctgctggagcgcgacggcaaagtcaccgcctcggagttggtggagcacttcgccgtgtcccaggacaccattcgccgcgacctcggcgaactcgccgccgccggcctgctgcaacgcgtgcacggcggtgccttgccccgacccaaagacaccggcaaggattttttcacccgagtgggcgaaaccaacgacgccaagcgccacctcgcgcgcctggccgccgagcgggtcgaggacggccagatcgtgctgttcgattccggctccaccaccctgcagatcgcccagtcattgccgcactcgatccgcctcacggtagtcaccacatcgcccatgatcgccatcgctctggccgaccatcccgacgttaaagtgatccttaccggcggccaactcaacccggccacgctgtccaccagcggtcatgaaaccgtgcggctgatccagagcgtcaaggccgacctgctgtttaccggcgtgtgcgcgctgcatccgcaagtcggcatcagttcgctgcattttgatgaagtggcggtcaagcaagccctgctcgacagtgcgtcccacgtggtggcggtgaccatggccgacaagctcggcgccgtggagccgtttgtggtggcgccgtgcagtcgtattcacacgctgatcaccgaatggcacgtgccgagtgtggaggcgtatgaacagctagggttggaagtgctgcgggtagaggtcgagtaggcacagtcagaacagcacctcggacgcatcgcgcatgaaaatctcgatggtcttggggcctacaccgtcgaattccccaaggcgtttttcgaaggcctcacggctttcgctgacactgcgcatatgggtgatcttgccggcgtattcggcgttcaacctggcgctgaggtcgagcaagcgttgcgcggtggtttcgtcatagcgcacgtaatgtgcgcgtccaagcatggccaccaattcacgcgatgtgcagtgctgcagcttgcgcgcagtgtcacggcctgcctcctcgacaatcactttataggcctgcgcggcaatcggtgcctggatacgcttgcccatcaggaagctggcgataaaccacttgaacagagcgtggtcatcgccgggcttgaggtcgatgcccaactccgtcgcgctgatggcacgggccatgctcagtggcccagcttgcgctcggccttggcggcctgttcgttgatggcatcggtctggcgttcgatgtcctttatcgaggtgggcgtcaccactttatcgatggtttcggtcttgggattcgggcggtccagggtttggcccttgacgggtttttccgtgccgctctgggcttcttcagagctgatgggtgcaggggttttatcggcagtcatggtgtatctccagtcaattgaaagcccgtgaaaacgccgggcgcttaagcagcagaggcttgccggtgtggatagttcaaggaaattgcccgcgccaaccgtccgagaaataagcgcaaattaatttaaacctttgccgtgcgagccggatcaactctcccagatcccattccccatcaggagacactcgatcatgagttcacacctaaacggcaagaagattctggtcatcacctccaataccggcatcgagcgcgacgagctgctcaaaccgttggaagcactgcgcggttatggcgcgacggtgacccacgcctccagcaagggcggcaccacacagacttttgtcggcgacaccgagaaagaccagacggtggaatccgacgcaaaactgtccgagctcagcgctgctgatttcgatgcactggtcattcccggtggcaccgtcaatgcggacacgttgcgccaggatgcggccgcgttgaagctgatcaacgcgttcgtgcaggccggtaaaaccgtggccgcgatctgtcacgggccatgggcgctgattgatgcaggcgtaatcaagggcaagaccctgacctcctacaagagcgtgcgcatcgacctggaaaacgccggtgccgccggctgggtcgatgccgacgtcaaggagtgcaaggctaacggctggacgctgattacctcgcgtacaccggacgatctgccggcgttcaatgaggcgattgccaaggctttggcaggctgacacccaagggctgaacgaaaacaggcgcctcgaaggcgcctgtttttttatgggctgatgcctcagcttttacgatgctccggcatttcccgtttcggcccgaacatcgcccaggcgatcagcccgaacagcggtacaaaaatcagcaccaccagccacaatcctttcgactcccagccccccgtgctgcgcaacacgatattgatcgcccacaattccagcagcagcagaatcactgccagaccaatccagatatattgaatttccatgcttcacctcctaggtcatatgccttaggtcaagcaggggccgcgagggttcattaaaattttcgcgatggctcatccgcaacgggtggctcgggtgtaagcccccagtcgccgtgttcataccagtcatcaccgagcatctcggccgggtgcatggtgcggtcggcaccattgccgcaggcgaggtcggaggcgccgcaatagcggtcacacccccagcagatgcgttcagggtgtttgggatgcagcggaaatggcttggccatgaagcagtttcctaccggcgaactgtgggtcaagcctaacgccacgatcccaacccagccttgacccggatcaagccgggcaatcatgaaatatcctgcaaacttgacaagaatcattattattcacgccagaccttcctagactcgggctctctcccctcacccgtcaggaagccctcatgcgtacctcatccctgctgcccatcctcctgttgatgaccacctgcgcagcgtccgcgaaagagtatccaatcggcgaaccgcaacactgcccggggctggaaatcggcgcggtgtacctgcaaccgatcgagatggcccccgccggcatgatgcgcgccaccgccgattccgacgtgcacctggaagccgacgtgcgggccaccgcagacaacgcgcagggttttcaggaaggcagtttcgtgccttacctgaacctgtccttctcgctgaaaaaacaaggcgacacgccgcccatcaacggtgacttccacgccatggtcgccaatgacggcccgcactatggcgacaacgtcaagctgcaagggccgggaaaatacagcctcaccttcaccgttaccccgcctttcggccaccattccctgggccgtcataccgacaaggaaaccggggtcgcgccttggttcgaacgctgtgaagtgcactacgaattcgtctacgccggcatcggcaagaaaggtggttattgatgcgccgcgccctgctgctcggcgggtgtgtgctgaacggcgcagccttggcggcaccgttacccacctatgaactgaacctgcaagacggccacttcaccccaccccaattggcggtcaaggccggcgaacgtttcaagatcgtgctcaagaacctcggccaaggcccagccgaattcgaaagcacgccgttgcgggtggagaaagtcttgtcccctggggtgaccacctttgtggtgatccaccccctcaagccaggcacctatccgttcttcgacgaattcaacccccaactgcccgaaggcagcatccgtgccgaataggagccgttgatgaacacatcgatgtttattgtgtggcgcgaaagcgtcgaggcgctgctggtgattggcattctgcaggcctggatcagctgccaggccggtcgctcacgcctggcccgttacctctgggccggcgtgctgctgggcctgctcggctccgccgggttggcggggttgatgctgtgggccggcgaaaccatgaccggccccgcgggtgaatggctacaagcggcgctgaccctggtcgccagcggcctgatggtgcagatggtgttctggatgcatcgccatgcgcccaccctcagacaccggctggtcagtgaagccgaccagcgcctggcccgccacggcggctggggtgtgttgctgctggccctgctggcggtaagccgcgaaggcagtgagaccgtggtgttcctgtatggcgccggtgcccgtctgcacgacgaagccctgggcctgtttgccgtcggtggcgtgctggggctagtgctggccgggctgaccgtggtgctgttgcgcagcagccgacgctttatttcctgggcacgttttttcgccctcagcgaagccttgctgttgctgctgggcggcgcgttattggtcgctgcggtggaccgcatcagtgggcagctgctggcgatggacatgcccgactgggtctactcggccttcggtgacagccgctgggacagcagcctgctgctgaacgacagccacggcctgggcgcgttgctggcagacttcgccggctaccgcgccgcgcccagcctgatcacggtgctggtgttgctcggctattggctgctggtgggcaacggcctgcgccggtcacggcaagccgcatgagctggctacagcaactgggcgatggcatgcgccgccatgggcggctgatccgaagtgtgcaatgggcggtggtgctggtgtacgccgtgctgctggtgttgccgacgctgctgcccctgccggacagccaggcgcgcctgctcgacaacctcacgctgcttgcgcaattcatcttctggggcctctggtggccgttcgtgttgctgtcgatggtgctgttcgggcgcctgtggtgcggcgtgctctgcccggaaggtgccttgagcgaatgggccagccagcacgggcgcggcctgggcattccgcgctggctgcgctggggtggctggccgaccctgggcttttgcttgaccacgctctacggccagttgatcagcgtgtacgactacgcccaggccgcgctgctgatcctcggtggttcgaccctcgcggcggtcgtggtcggcctgctgttcgtgcgcggcaaacgcgtctggtgccgctacctgtgcccggtcagcggcgtcttcgccctgctcgcccgcctggcgccggtgcacttcgccgtcgatgaacaacgctggaaggccaacgccgcgccacgcctgccgttgcccaactgcgcgccgctgctggacatccgtcgcctgcaaggcgccagcgaatgccacgcctgcggccgctgcagtgggcaacgcggtgcggtgcaattgatcgcccgctcatgcaaccaggagattctccaggcacccctgcaccacggctcggcctgggacatacgcctgctactgttcggcgtgatcggcctggccataggcgcgtttcagtggacggtaagcccctggttcatcgccctgaagcaacacctggccgagtggctggtgagccgcgactggctatggccgctgcacgacaacgccccctggtggttgctcacccattacccgcaaagcaatgacagtttcagctggctggacggggggtgcatcgtgctgtatctggccggcagctcgctggtggtgggcggcggatgctggctgtggttgcaactggctgcgcgctcggcgggcgatcgcgcactgtttcggcccctggcgctgacattgacgcccctgggtggtgcggggttgttcctggggttgtcggcgaccacggtgaagctgttgcgctatgaaggcttggtattggcgtgggtgcaaccgctgcgagcggggatcttgatggcggcgatcggctggtgcctgtggttggcgtggcaacgactcgagggactgcctcgcggacgggcgtggctgtgcatgctgatgagtaccgggttgatcggctatggctggtggctgcagttctggggctgggccaactgaagcattgagactgtgggagggggattgccccctcccacatttgccaacttctcgctagaccttgaagcgcgccacggtctggtgcagcgcccccgccatccccgccagttcatgccccgccgtctccgtatgcaaggcgccctgcaacacctgctgcgacagggtgcggatgccaatcaggttgcgatccacctcccgcgccaccagcgcctgctcttcggtggcgctggcgatcatcatgttgcgctcgttgatctgcgagatagaccgggtaatttcatccagcgcctcccccgaacgctgcgccacgccgagggtcgcctgcacccgctcactgctgctgtgcatggccgccaccgcgtgttcggtgtcctggcggatattgccgatcatctgctcgatctcctgggtcgaggcctgggtgcgatgggccagcgcgcgcacctcatcggccaccaccgcgaacccgcgcccggcatcgccggcccgggccgcttcgatggcggcgttgagggccagcaggttggtctggtcggcgatgctgcggatcacttcgagcacgctgctgatatcctgcacacggcccgccagttgctggatgcgctccgaggtttccaccacgccggtggccagggtgttgatcgacgccacggtctcctgcacctgggcgcgaccgcgctgggcagtctgttccgacaggcgcgaagcctcgctggtactcaccgcattgcgcgccacctcgtccacggcggcggtcatctcattcacggcggtggccgcctgctcgatctcctggccctgggactgcaagctgctgctggtctggctgctgaccgcgctcaactcttcggaggaactggccacgccgtccaccgacgcggcaatctgccggaccatctggttaaggttctgctgcatctggtgcaggttacgcatcacactgccttcggcgctgttgcccagcggcacttcgatggtcaggtcgccttgggcgatatggctgagtacgcgcgccacctcatccggctccccgcccagcgggcggatcacgctgcgggtgacgatgacggcggcggtcaccaccagcgccacacacaacagcagcagccccagcatggtacgccgggcgtcgtcgtacagcacctgcgccgcctgctcacgctcggcgaacacgcgtccctgcatggccatcagcgcatccaggctcttgaacaccgcaagctcggccggcatcacctgttgcttgagctgggccagcccctgttcgcgggcgccctgtttgatcagcgcctgcacctgggtgaaggccgccacataggtttcacgatgggccttgagggtcgcataggcggcctggccttcggcagtatcgagcaacggttcgagggttgcgaacgcctcggtgatgcgttgccgggtgctgccgatcgaagcttgagcggcctgattatctgcgtcgatcagcaggtcgcgggtgttgcggccgttatcgcgcacgccggtggcgatcaccatgatcggcgcgattttcggccagtcctgctgcacgatctgtgcggattgttgcttgagggtcgccaggtcgtgcaaggcgtagaacaccaagccgaccagggccagcggcgcaatcgcgaaaccgatgacaatgcgttgtgccgtggttaactgcttcattctgaacattccttgatgaacacctgcccaccatgggcagcatctttaaaaaccggttgagggtgtcggtcaccctcgcaagacaaacgcgggaaacaactcgcgcaaacggccccacagctcgggcaacgcagcctgtgccggtgcactcggcaattgcgggtcgagcatgctgacggtgcgcaccatctgcacggcgaagcgctgcacacccgtggcttgcaaacgctgggccagccgcaacaaccggggtggatcgatcaggtgccaatgcaccgtggtgcggcactcgtagtccacgccactggcgagcaaggtgtcgaggctgcgccagttggcggcgccactgcccttgacctgggtgatcgactggcagtcttcggccagggccttcacgtcgaacccgacccagtcggcatgacgcaacgcattggcaaaccctgccggtttgatcccggcgctgtgcaagccgatgtgaaaacccatcgcccgcacttcatccatcgccgccggcaagccttcctgcaaggtcggttcgccgccgctgaacaccacggcatcgagcaagtcccggcgccgttgcaggaacagcagcacccggcgccaatccacctccgtgctggcgcgcggcgggatcaggtccgggttgtggcagtaacggcaacgccaggcacagccctggcagaacagcacgcaggcgagcatgccggggtagtcgagggtggtcaggggcaccaggcccccgacccgtagcgctcggctcattgccgcccggccgccgcagccgtttcggtgaagtgcacgcgctccttgtgctcggactgcttgccggggttgaacgccgaaaccggccggtgataacccatcacccgggtccagacttcgcagcgctgacgttgtggctgggatgcttgcatggtgaatctccttggggttgaaaagcttggtttaacgggcggctgccagggcttcatcgcacttggggcagaactcatgttcaccggccagatagccatgcaccgggcagatcgaaaacgtcggcgtcaccgtgaggtacggtaggcggaagcgccccagcgccttgcgcaccaactgcttgcaggcctgggtcgaggaaatctgctcggccatgtacaggtgcaacacggtgccgccggtgtatttgcattgcagttcgtcttgcagctccagggcttcgaaagggtcctgggtaaagcccaccggcagttgcgacgagttggtgtagtacggcgcgacatcgctgcccgcttgcaagatatcggggtagcgcttgcggtcttccttggcgaagcggtaagtggtgccttcggccggcgtcgcctcgaggttgtagagatggccggtgtcttcctggaagcgcagcaaagtggcgcgcacgtggtcaagcaacttgagcgcaaaggcgcggccctgctcggtgtgcatgccctgctcgtcaccgctgaaattgcgcagcatctcgtgcatgccattgaggccgatggtggagaagtgattgcgcagcgtgcccaggtagcgtttggtgtaggggtagagaccggcgtccatgtgatgctggatcaccttgcgcttgacctccaggctctccatggccatctccatcaggctgtccaggcgtttcagcaagcccgaggtatcccccttgaacaggtagcccaggcgcgcacagttgatggtcaccacccccaggctgccggtctgctccgccgagccaaacagcccgccgccacgcttgagcaattcgcgcacgtccagttgcaggcggcagcacatcgagcgcacctggttgggctgcatgtccgagttgaggaagttctggaagtacggcaggccgtaacgtgcggtcatctcgaacaggcggtcggcgttgtcgctgtcccaggggaaatcatgggtgatgttgtaggtcggaatcgggaaggtgaacacccggcccttggcgtccccggcctgcatgacttcgatgtaggcacggttgatcaacgccatttcggcttgcaggtcgccataggcaaacggcatttcctcaccgccgatcaccggcacctgttcacgcagatcttctgggcagacccagtcgaaggtcaggttggtaaacggcgtctgggtgccccagcgtgacggcacgttgaggttgtagatgaactcctgcaccgcctggcgcacttgcggatagctcagctgatccttgcgcacatagggcgccaggtaggtgtcaaaggaactgaacgcctgcgcgccggcccactcgttctgcagggtgccgaggaaattgaccatctgccccagcgcgctgctcaagtgcttgggcggccccgcctccacgcgtcccggcacgccattgaggccttcgtgcaacaacgaacgcagggaccagccggcgcagtaaccggcgagcatgtccaggtcatggatatgcaggtcggcctcgcgatgcgcacggccgatctgctcgctgtagacctcatccagccagtaattggcggtgaccttgcccgccacattcagcaccagcccgccgagggaatagccctggttggcgttggcctgcacgcgccagtcttcgcggtcgaggtattcgttcatggaggtggcgacttccaccagggtcttgcggtcgcggcgcaggcggccgtgttgttcgcggtagacgatgtaggcgcgcatcgacaggaagtagccggcgtccatcaatacgcgttcgacgctgtcctggatttgttcgacgtccagttggtcgatgcctctcaggcgggccaggacggcgcccagcagcaggtcgacgtcggggggctggtattcgccggtggcggtgccggcggcgatcagggcctggcggattttttcggcgtcgaaggggacgagcgtgccgtcgcgtttgtgtaggcgggtgctggtcaggggggtgagcgcggtttgcattggggggctccagacactacatatagatattttttagtctttaaacacaatatgcggtgatattacgaatagctcggagagtgtcccttgatcgggatcaaggtttttatgatcgggggcatatccgttatttaggtcacggcggatattggttccgcccttacggcgggtcactttggaaaagagcctgtatggaccggacacatggttgacgggtgtacggggacatggtggacacttttcggcggataaacttcgccgggaaatcatcatgccttgggacacgagagataccatgagcctgaaagaaga

SEQ ID NO: 9 - DNA, 14711 bp, Pseudomonas nodulensis
acacgctggccgaacgcaggcttgaatccgtgggtaacccggcaggacgccgggttagccgcactgggccatggatggcccattgcggcggcccacggattcaagccggagtgagggcacaccgagcctaggcgaggtgccgagtgttggggcgaagcgtttttggttactttttgcgctcttcaaaaagtgacccgccgtaagggcggaaccataagccgccgtgaccgaagaaacggatatgtacacgacgaccaaacagcccccatcaccccccactcacactcataaaccgcaccacctgcacctcccccgcccccgtaaaatcatgccccaacggcttcccccgcaacgcccgatgcaacgcctcaaccaacggcccatcctccagcggatagcgcctgagcaacccacacaggtccagcgcatcctcctgccccagacacaacaacaaccgcccctccaccgtcattcgcacccgattgcaactgccacaaaaattctgcgaattaggcgaaataaacccgatccgcgtccgcggatgccccgccagccgcacatacctggccggcccaccgctgttctcggtgctgtcgagcaacacatgctcacgggcaatcaccccacgcacttcatcactggcacagaacgtctccccccgcgaacgccccacatcccccaagggcatttcctcgataaaactgatatcgatcccctgctcgatcgcataccgcaccaaccccggcacctcatcgaaattgcgccctttcatcaccacgcaattgagcttgacccgctcgaaccccgcatcccgcgccgcctcgataccgtccagtacctggcgcaagtcaccgttgcgggtgatcgcccgaaaccgctcggggtccaggctgtcgaggctgatgttcatgcgcttgacccctgcgtccactaagggccgcgccaatcgcgccagttgcgagccgttgctggtcatcaccagttcacgcaagcccggcaacgccgcgatgttgcggcacagcccgacaatcccgggccggatcagcggctcaccgccggtcaggcggatcttgcgcacgccctggtccacgaacaaccgggccaggcgttccagttcttccaggctcaacacctgctggcgcggcaggaaggtcatggtcttcgccatgcagtacacacagcgaaaatcacagcggtcggtcaccgacaagcgcaggtagtcgatgctacggccgagcccatccaccaggctcatgtcactgcaccaacggcgagtcggcgccctgcagcgcaaggccacgaatgtccgccgcgccgatcagggtttgcaggtactgcaccaatgccttctgccatacgccttgttgcagctgggtgcgaatcgccccggccacggcttcatagggcagaggttgcccttcgatgcgctggtcgatgctgatcacgtgccagccatagcggctttccagcggtttgtcagccaggcccggtgccagggtgaacagttggcgttccagttccggcacggtctggcccttgctgatctggcccagcgaaccgccctgggccttggaggggcacgccgaatacttgagggccagctcggcgaaagtaccgggggtctgcgccaggctcagcaacaggatttccgcctgcacatgggccatctggcgtgcctcggcatcgtccggcgcgcactcgagcaggatgtgccgcaccgccagcaacggcgcgctgtggaagcgcccgcgattgctctcaaagtaatgccggcaggtcgcttcgtcgcactgcggcacgctgatttcgcgctccagcagcaagcgcgtggccgcttcctcttcgttctcgccgggggcgatgtccaccgccaggcccaattcggcaatacgctgttgcagcaactcgcgaatcaccagggcgcgggccgccaggtacaccgccgcctcgcggctttcggccgggtggtattgcaactccagggccatcgcctcaggcgtgatcgacacgccgttgacgctgacgatgggccattcctgttcactgctggcaatcaattcaggctgggtcatcacgcgctcctcacgacttctgccgcacgatttggtaacgccgccccaggtaccagatcggcgcgctgaccatgtgcaccaggcgggtaaacgggaacagcacgaacagggtcaagcccaatgccacgtgggccttgtagatcagcgacaccggcgcaatcgattccgccgcctgcaccggtcgcagcaacaccacgttctgcgcccagtcggcgagcatcaccatcaccgagccgtccatgtgcccggtcgaggcgacgatggtcagcaaaccgagcagtaactgcgccagcagcaccagcaggatcaggatgtccgacgtactcgatgtggcgcgcacccgcgggtcgctcaagcggcggttgaccagcatcagcaagcccaccaggcacagcaggccgaagaacccgccggagaccatcgccagcagttgcttgttttcagtgctgattacgtggtgatagaccgacgccggtgtgagcagaccgacgaaatgcccggccagcacaaacagcacgccgatatggaagaagttgctcgccacgcgcatgccacggttgttcagcatctggctggagccggccttccaggtgtactgcgacaggtcgaaccgcgcccaactgcccaacaggcagatcgccagggccacataggggtacaccccgaataccagcaaattccacttagacattacccacctccccggccggcacggcggccggcgctgcttgctgaaaatccacccaatgcagcggcacggcgctttcttcccgtgccttgccgggagcgctcggcatcgcgctgcaacggtcctgctgctcggcctgcataaagtccacggcctcctcttcccatactttgtcgagggcttcgagggagtcgtcgcgcggctcggccgccacctgggcgcgcacctcggccacggcctggtgcggctcggtgccggcgatctgcaacagcgcgcgcatgcaactggcataggcgctctcacgctcttccaggcgcgccgcgagcaacgccagcaggtgcgccacatccgccaggccctcgcgggcctcgatgtcttcgcgggtggagaggaactccaggtacagcgggatatagtccggcagctccttgacgccgatggcaaacccggcggcctcgtactgggccatcatgtcgaccatcgcctggccacggtcccgggactcgccgtgcacgtgttcaaacaacagcagcgacagcgagcgaccacggccgaacaacgcgccgtaatgctcctggccatccatcaggtcattggcgcagatcagctccaacagctcgaacaacgcaccgcgttgcttggggctgatttcccgcgactcgatgatcgcctgctccagttcatcgcggccgttcaccagggtctcggtgggatagtccagcagcaacgaaatcactttaagaatgcgcatggctcagtcctcccagatctgcacggttttcaggacgtcgcggcgattggccttcttggcgccgaacatattggtgtcggaactgccgctgcagccgctgccgaagctgaaaccacagccggaacgttcggcgaacgcgtcgctcatggcgtcttcacggtgcgcgctcggcaccacaaagcggtcttcgtagttggcaatcgccaggtagcggtacatctcttccacctgcggcacgctcaggcccacgtcttcgagcacttgcaggtcctgcacgccatcgacctgctgggaacgcttgaacgcacgcatcgccaatagacgcttgagggcacgcttgaccggtttttcatcgccggcggtaagcatgttggccaggtagcgcagcgggatgcgcaggctgtccacgtccgggatcaccccgttcatgcccacggtgccggccgcggcggcgttctggatcggcgacagcggcggcacgtaccagaccatcggcaaggtgcggtattccgggtgcagcggcagtgcgagtttccagtccaccgccatcttgtacacgggggaacgctgcgccgagtcgatcaccgactgtggtacgccatcggccaaggcctggcggatcaccgccgggtcattcgggtcgaggaagatctccagttgtttctcgtacaggtcgtgctcgctggccgtgctcgccacttcgctgatgcggtcggcgtcatagagcaacacgccgaggtagcggatgcgcccgacgcaggtttcggcacacacggtgggcatgccggcctcgatgcgcgggtagcagaagatgcacttctcggacttgccgctcttccagttgaagtagattttcttgtacgggcaaccgctgatgcacatgcgccagccgcggcatttttcctggtcgatcagcacgatgccgtcttcttcacgcttgtagatcgcaccgctggggcacgacgccgcgcatgccgggttgaggcagtgctcgcacaggcgcggcaggtacatcatgaaagtgttttcgtactcgccgtagatatccgcctggatctggtcgaagttcttgtccttgcggcgcttggcgaactcggtgccgaggatttcctcccagttggggccccactcgattttctgcatgcgcttgcccgataccaccgagcgcggccgcgcggtcggttggtgctcgcccaacggcgcggtgtgcaggtgctggtaatcgaagtcgaacggctcgtagtagtcgtccaggctcggcaggtccgggttggcgaagatattcgccagcacgcggaacttgccgccgatacgcgggttgatgctgccgttggcgttacgcacccagccgcccttccacttgtcctggttttcccactccttggggtagccgatgccgggcttggattcgacgttgttgaaccaggcgtattccatgccttcgcggctggtccacacgttcttgcaggtgatcgagcaggtgtggcagccgatgcatttgtccaggttcagcaccatgccgatctgtgagcgaatcttcatctcagttctcctcgatatcggtcggcaatgggcgcggcaagtcatcgccggtggaaccatcgagccagtcgaccttggccatcttgcgcaccacgacgaactcgtcgcggttgcaaccgaccgtgccgtaatagttgaagccgtaggcctgctgggcgtagccgccaatcatgtgggtcggcttgagcaccacgcgggtcaccgagttgtggtggccgccacgggtcttggtggtctccgaaccgggcacgttcacgatgcgttcctgggcgtggtacatcatcaccatgccctccttgacccgctggctcaccaccgcacgggcggtgagcgcgccgttgacgttgaagcattcgatccagtcgttgtcctcaatgccggcgcgtttcgcgtcgatctccgagagccacacgatcggcccgccacggctcagggtgagcatcagcaggttgtcgctgtaggtgctgtggatgccccatttctggtgcggggtgatccagttcagcacgatctcggtctcgccattgctgcgcttgcccttcacgccttcgatggtgcgggtgttgaccggtggccggtagctcatcagctgttcgccgaaagcctgcatccacgggtggtcctggtagaactgctggcgaccggtgatggtgcgccatgggatgttttcatggacgttggtgtagccggcgttgtagctcacatggtcgtcttccaggcccgaccaggtggggctggagatgatcttgcgcggctgcgcctggatatcgcggaagcggatcgcttcgtgggccttgggcaacgccaggtggctgtggtcgatgccagtgaaggccgacagcgccgcccaggccttgaccgccacatggccgttggtttccggggccagggacaggatcacctcggccgcatcgatggccgtgtcgatcttcggccgaccgtggctgatgcccgcgtcgccttcgtgatggttcagctcgccgaggaaggccacctcgtcatcggtgttccagttgatgcccttgccaccgttgccgagtttttccagcaagggcccgagggaggtgaatttcttgtagatgttcgggtagtcacgctccaccaccgccatgttcggcgcgttcttgccgggtacaggcgccacaccggcgcttttccagtcggtgccgccgaacggctgggccagttcgccgacgctgtcgtgcagcaacggtacggtgaccaggtcctgctcgacgcccaggtgcccgaccgccatggccgaaaacgccttggcgatgcccttgtagatttcccagtcggaacgcgactcccacgccgggtcgatggccgccgacaacgggtggatgaacgggtgcatgtccgaggtgttcatgtcgtctttttcgtaccaggtggcggtcggcaagacgatgtcggagtacacgcaggtggacgacatgcggaagtccagggtggtcaccaggtcgagcttgccgatggcgccgtcgtcgacccattcggcttcggtgggcttgctttcgccgccaaagccgatgtcttcgttcatcacgccgttcttggtgccgagcaggtacttgagcatgtactcatggcccttgcccgacgaaccaagcaggttggaacgccagatgaacatgttgcgcgggaagttcaccgggctgtccggttgctcgcaggcaaagcgcaaggtgccgtcctgccaggccttgaccacgtagtctttgggctccataccagcagctgccgcgtcccggcagatatgcagcgggttggtgttgagctgcggcgcgctgggcaaccaaccggcgcgttcggcgcggatgttgtagtccagtgcatgggtggggaactgcgacttgtccgccatcggcgacaacacgtcgtgcatgttcattttttcgtggcgccactgcgagctgtggccgtagaagaagctggtgccgttcatctggcgtggcgggcggctccagtccaggccgaacgccaggggcagccagccgcattgcgggcgcagtttttcctggccgacatagtgggcccaaccgccgccggtctggccgacacaaccgcagagcatgagcatgttgatcagcccgcggtagttcatgtccatgtggtaccagtggttcatcgccgcgccgacgatgatcatcgagcggcccttggtcttgtcggcgttgtcggcgaactcacgggcgatctggatggctttctcgcggctgacgccggtgatcgcttcctgccaggccggggtgcccggcacgctggcgtcgtcgtagtcccgggccacgttgctgccgcccaggccacggtcgatggccaggttagcggcggacaggtcgaacaccgtggcgaccttggcaatactaccatcggccaacgtcacgctgtgcaccggcacgcggcggaactgtacggcgtcaccggccacgtgctggaagtgttcgtgggcttcaccggcaaagtacgggaagccgacttcggccacgtctgcgccgatcaggctgagcttgaggtcaatttcacggccttcaccgccctctttggcgaggatgttccacttgcccttctcgccccagcggtagccgatggacccttgtggcgacaccagttcgccgctctcgtcgagggcgatggttttccattccgggttgttgtcctggcccaggttgccggtgaggtccgaggcgcgcaggaagcggtcaggctggaagccagcgccgggggcaaacccggtcacgggcttgagcatcaccagcaccggcaggtcggtgaagcgcttggcgtagtcggtgaaataggcgctcgggtggtcgaggtgaaattccttgaagatcacatggttgaaggcctgggccaacgcggcgtcggtaccctgcttggggttgagccacaagtcggtgagcttggccacttccgagtagtcgggggtgatggccacggtcttggtgcccttgtagcgcacctcggtgaagaaatgcgcgtccggcgtacgggtctgcgggacgttggaaccccaggcaatgatgtagttggagttgtaccaatcggccgattccggcacgtcggtctgctcgccccacaccatcggcgaggccggtggcaggtcgcaataccagtcgtagaagctcaggcataccccgccgagcagggacaggtaacgcgagccggccgcgtagctgaccatcgacatggccgggatcggcgagaagccgacgatgcggtccggcccgtattgcttgatggtgtagacgttggaggcggcgatgatctcgttgacctccgcccagttggagcggatgaaaccgcccatgccgcgcttgctcttgtacgactcggccttggccttgtcctcgacaatgctcgcccaggcctccaccggggccatggtcaggcgcgcttcacgccacagcttgagcagcggcttgcggatcttcgggtacttgagccggttggcgctgtagatgtaccagctgtagctggcgccacgcgggcagccacggggttcatggttgggcaggtcgttgcgggtgcgcgggtagtcggtctgctgggtttcccaggtgatcaggccgttcttcacgtagatcttccacgagcacgagccggtgcagttcaccccgtgggtggagcgcacgatcttgtcgtactgccagcgcgaacggtagacgttttcccagtcgcgggactccttgcgggtctcgccgtggccctcggagaactcgtcttgcttgcggttgaagaaccgcagttgatccagtaagtgactcatggtgctttcctcatcaggcgtgccgtggggtgcgttgccccgcgaattcaggtcggactagcagggtgtggcgcagcccttgcgggcgtaccaccaccaggtcacgacgatgcagctcaggtagaaaccgacaaacatgtagaaggccatggccgggctgccggtggcggccatggaactgccgaaggatttagggatgaagaacgcgccgaatgcgcccatcgcagagctgaaccccagcaccgcagccgattccttgccggcgtccttcagggcctgttcacgcaccgcagcgggtttgccggcgctggccttctcgtgaagggtgcggaagatcaccgggatcatgcggaaggtcgagccgttgccgatgccggtggtgatgaagagcagcatgaacaggccgaggaagccgtagaagctgccgccctgcccgttctgcggcagaaagtgcagcacgccgaacaccatcacgatcatcagcacgaagttccacagggtcacccgcgcaccgcccagtttgtccgccagccagccgccgagcgggcgtaccagcgcgcccaccagcgggccgaggaaggcgaatttcagcgccaccacctcgggaaacgaggtcttgatcagcagcgggaacgccgccgaaaaaccgatgaatgaaccgaaggtcgcgaggtacaaccagcacatcagccagttgtgcttgcgtttgaagatcaccgcctggtcgctgaacgacgcacgggcgctggacaggtcattcatgccgaaccacgcggccacggtgacggtgaggatgaacggcacccagatgaaaccggcgttctgcagccatagctggctgccgtccgccagggtttgcggttgcccgcccatcaggccgaacaccccgaaggtaatcaccagcggcacgcagaactgcatcaccgacacgcccaggttacccaggccggcgttcaaacccagggcggtgccctgctgcgccttagggtagaaaaagctgatgttggacatgctcgaagcgaagttgccgccgccgaaaccgcagagcaacgcgatcaatacgaacacgctgtacggcgtgttggggtcctgcaccgcgaagcccatccacagcgacggcagcagcaacgacgcggtactcagggcggtccagcggcgcccgccgaagatcggcaccatgaacgagtagaacacccgcaacgtcgcgccagagaggcccggcagtgccgccagccagaacagctggtcggtggtgaagctgaagccgatggcgttgaggcgcacgatcaccgtgctccacaccatccacacggcaaaggccagcaacagcgcggggatcgagatccacaggttgcgggtggcggtcttcttgccgctggcgccccagaacgctgggtcttcggggcgccagtcatggatcaccgggcccgaggtgggcttttgcgcaatggacatgatcattctccttggagcgcgggcttgccgagcagcggttgtttgcggatttcgctgaagtacatccaggccagggacacccagaccacgccgtacatcaacatgaagcaggaagagcgcacgccagtgaggtccaccagggcgccgaacataatcggcagcacaaagccacccaggccaccggccaggccgacgatgccggacaccgcgcccatgttttgcggatagtcattggcgatgtacttgaacaccgaggccttgccgaacgcgaaggcgatgcccatcacgaacagcagcacggtgaacagcgcaggcgtgaggccgatgtggaaatccagcgggccgttgacggtcatcacctgcaactgggtctgcgggtagctgagcaggaacaggcacacccagctcacccacaacacccaccaggtcacgctctgcgcgccccagcggtcggacatccagccgcccacggcgcgcagcacaccacccggcagcgagaaacacgcggccagcagcgctgcgctttgcaggctgaaaccgtattcctgcacgtagtacttggtcacccacagcgccagcgccacatagccgccgaacacaatcgagtagtactgacagtagcgccacacggccgggtctttgaggcacagcaactgctggcgcaaggtggcgccgccggcgctgcggtgggccttgttttcgctggtgaggaaccagaacagcagcgcggtgataaacaggatcgcgctgaacaccttgggcaccaggtgccaggtgccgagggcgatcaagcccggcgcgagaaacttggtcaccgccgcccccgcattgccagcaccgaacacgcccatggcgaagccctggttgtgcttgtcgaaccatttggcgacgtaggcgatgcccaccgaaaacgagccgccggccaggccgacaaacaggcccagcaccaggaactgccagtaggcggtggcgtaggtgatcaggtacagcggcaacacgcaggcaagcatcagcaggaagaacacgatgcgcccgccgaaacggtcggtgagcaggcccagcggcaggcgtaccagggagccggtcaatacaggcgtggcggccagcaggccgaactgggtttcgttgagttgcagcagctccttgatgggcacgccgagcacggcgaacatcatccacaccataaagcagacggtgaaggccagggtgctcatgcccagcaccaggccttgtcttatacggggttgagtcacggtatgcgctccagaaagtgattccatgggcgcaggttaggggcggcacttgggtggaacttgacccaggtcaacgtccgccgggtaggtatggggctatgctcgccccgtctacctccaaggaggtagtcagcaaaacaagagaaagcctttatttatcaatggattgttctcttgtgccgggttttatccgtgggagggttcgccggcaattctttagaggtagtgcgccagggaaggccattgacaaccccctttcccgctccaggtgcgaccatgctgctctgccatccactccgtctgcgccgtcatgcttgactggctgcgcagttccctgcccgcccgtgccggcctggcggtgatcctcatcgcgatcctggccctggccagctccctcagtgccgggctgatcgcctggttcagccagggcgacgccgcggcgatcaacaccgcaggctcggtgcgcatggagacctaccacctcagctggaagctggcggccggcgcgcgcgcggatgaggtcgccgaggtcagccagagcctgcaacgccggctcgacagcccctcgctcagggcggcgctggaagacggcccgcaaagcgcgctgttgcagagttaccagcagatccgccaacgctgggacagcgaactgggcccggcggtgattcgcggtgatgccgacttgttccaggcccgcgcaccggcgttcgtcgagcaactgaaccagttcgtcagcctgttgcagcaacagagcgagcagaaacagagctggcagcaaggcattcagggcctggcgttgttcagcaccttgatcatcctgttgctcggcctgtacgagttgcagtacggcgtggtcaacccgctggaagaactggtgcacgccacccggcgttttcgcgacggcgacttcaagacccgggtcaaccaccgttccgaggacgaactgggccaactggcgctgagcttcaacgccatggccgagaccatcgaggcctcccaccgcactctggaaacccaggtgcaactcaagaccctcaacctgcaacaagccaacgccgccctcgaattgctctaccagagcagtcgcagcctggccacgcgcctggccaatgccgagggcctggatgaactgatccggcgcttccagaaacgcctgccgggcctgcgtctgtcgctgtgcctgcaaggtcacttcctcgcccccgcccagcagatgctggccctgcacggcgagaacagccgcaacgtgtgcgccatcggcgactgtgccacctgccagaagcacaaggccgcaccgccgcaggtgttcagcatcagcaaccagggcacggaactgggcgaactcaaggcgcacttcgtcgatggccacccgccccaggactgggaaaaacaactgatccaggccctggccaacctgatcggcacctcactgtcgctcaagcgccagcgcgagcaggaccaccgcctgttgctgctggacgagcgcaccatcatcgcccgcgaactgcacgattccctggcccaggcgttgtcctacatgaagctgcaagtgagccgcatgcaaaccctgatccgccgtggcgagccagtcgaaaccctggccaccgtcaccagcgaactgcgcgatggcctcaacaacgcctaccggcaactgcgcgaattgctcaccaccttccgcctgcagatccacgatgccgggctggtgcaggagctgcaggacaccgccgaagaattctcccggcgcggcgaattccaggtgcacttgcacgtggacgccctggccttccagctgtcggccagcgagcagattcacatgttgcagatcacccgcgaagcgctgtccaactgcctgcgccacgcccatgcacagaatgcctggctgcaactgcgccaggtcggcgagaccgtgagcttgagcatcgaagacgatggccggggtttctgcggcgccgtcgaccagcgcgaacaccacggcctgaccatcatggacgaacgcgcccgcagcctgcacggccagcttgagatcagcccacgcgagccccagggcacccgcgtgcaattacgtttccagccggaattcctcggccacaccctacaaggcagcacctcatgaacgtccctcttcgccaccggatcctgttggtcgacgaccacccgatgatgcgccacggcatgcgccagatcctcgaactggaagacgacctgcacgtggtcggcgaggccggcaacggtcaggaagccctcgaccagatcgccagcctgcaaccggacctggtactgctggacaacaacatgccgcacatgaacggcctggaaaccctgcgccgcctgcgggccatggactacgcgggcaaggtgttgctgtttaccgtgtccgacgctgaagacgatattcgcgatgccctgcgcctggatgccaatgggtatctgctcaaggacatggaaccggaattggtggtcgagtttatccgtgatgcgttgcatggcgcgttggtgatcagcccaggcttgaccagggtcttggcccaggcgttgcgctcgccgcagccccatgcggcggtggaattgactgatcgggagcggcaggtgttgaagacgattgccagtggctacagcaacaaggtgatagggcataagttggggattaccgaggggacggtgaaggtgcatgtgaagaatttgctgcataagctggggttgaggtcgcgggtggaggctgcggtttgggcgatggagcacctccggcaggtggggtgagcttttgaccgggtgtatatccattatttaggtgatggctgatatgggttccgcccttacggcggctcactttggaaaagccggaatgccggcccagcccaaagtaagcaaagggctcttgccccaacactcggcacctcgcctaggctcggtgtgcccgtaattcgacagtgatttggggggccgcctaagatcaaaatcaaaagcagatctaaagccagagccagagcaacagccacagccacaaccagagccagagccagagccagagccagagccagagccagagccagagccagagccagagccagagccagagccagagccagagccagagcaaaccacccttcaactgatacatgaagatcaaactgtgggagggggcttgcccccgatggcggtgtgtcagccaactcat

SEQ ID NO: 10 - DNA, 12287 bp, Pseudomonas nodulensis
aatccggtcggctctaaggccgccgcgctcttgatcttgatctggggcgccccgtcaaacacgctggccgaacgcaggcttgaatccgtgggtaacccggcaggacgccgggttagccgtcctgggccaaggatggcccatgacggcggcccacggattcaagccggagtgagggaacaccgagcctaggcgaggtgccgagtgttggggcaagagcgttttgcttacttttgcgctcttcaaaagtgagccgccgtaagggcggaaccataggtggccgttaccgaagaaatggatatgcccaccgagcccccccccccaacgagtcatatcccaaaccccggcgccgcagatagcgtcaggtcgcaagcccccgccccgcccgctccagattgcgccacaaccagggcggtaagacatccgggtcaaggctgtcgatcaggttcttcaagcccaaccccagctccgtatccccttcgatcaccaggcgccgccggaagaacaacgtatccgggtcttcctgccgactggccagcaacaagaactcgcgccaattgccgctgatggtcacttgggcctgcgccttctgcgcaatccgcaacccatcccgcgtcaacgtcaggtaccagcacaagcccaggtccggaatgcgcaggcacatccagcgtccgcgcagcaggtcaaaaccgtcgtcgcgcagcggctcggccaggcagcggttgagcccctgttgcaacgccaggcgctgcaccgcgaaaggcacacggcgaatcagcgacaatacccggtcagcacccttgagcaaccattgcttgcgattcaacacaaccccacctcctcgacccgcaacatgccggcctgcccatgccagtaaccgttgcagccactcaccagcaacggcggcgtggcaccctggcgcacctggtcgaaggcacgcaccacctcggccatgccttcggcccgtgggctcaggcgcaacaggtcggcgccacaggcgaccaagccgggatagtcagccagcaagttggtcacctcggcggacatcgtctgaatcccattcaaggtaaacagcgcctgcccttcctggctggtcaacgccatgccatccgggtagttgatgcagcaaaactggcagtcgtccttgggacgattctccgcacgggcggtgaagcagcgcgccgagtacgctaggggcaaatggccgtaggcgaagatctccacttcgggcagcggccgtcccagttcgcggacctgctccagcacatcggcgatcaagccgtgggagcattccaccggcggcacccagcgctgcatgcccgcgtcgagcagctgcaccagcgcgtggccgttgtagaggttgagcgccgggccaccgacaaagggcactttgcgctcgatcagcaactgcacggcgcccatgtcgttggcctccaccagcaactcgccgttgtcgcacaggcggcgcaggctggagagttcggacgcggcttcgatcagggtgaggctcgacagcacgatctgcgccgggctgcacgcctgcaactcacggcccaggcccagccattgatccaggttcagcgcgcggcgtttggcgcacacggtttcccccaggtaaatcacgtccaggggcaaggcggccatgtcggcgtagaagcgccccaactcttgcttgtcccaataaaacagcaccggtcccaggctgagtttcatcgatgtgtcctcattgccatgcacgatggtaagcccccagggtggtctggctgccttcggaaagcccggcaagcacctggcgccattggtccttgaccacgaaatgggccgggctgctgcggtgcgcgtcgagggcggcgcgccacacgcgggtgacttgctccacataggccgggctgcgttgccggccttcgatcttcaccgcttccacgccgatcgcactgagttcgggcagcaggtccagggtgtcgaggctggtgggttcttccagcgcatggaagcgcttgccgcccaccaggaaacggcccttgcacagggtcgggtagccggcgggttcgtccggggtgtagcggtcgatcagcacttcgctcaggcgtgcgctgaggccatcggcatcctcgctccagcgcaccgccttggccggcgaacacacgccgcacaggttgggtgattcacccgtgatgtaggaggacagatggcaacgcccttcggccatgatgcacaggctgccaaaaccgaacacctcgatgggcaccgtgccgctggccgccacctgcttgacctgcgccaacgacaacacccgtggcagcacggcgcgccggataccgtagcgctccacatagaatttcaacgccgccgcgtgggtggccgagccctgcaccgacaggtgcaacgccagctgtggatgatggtgcgcggcatagccaagcacaccggggtcaccagcgatcagcgcgtcgacgccatggtcggcggcgcggtccacggcgcgctgccaacgcgaccagatcttcggctgcgggtaggtgttgaccgccacgtagagcttgcgctggtgctggcggatatgggcgacggcggcgtcgaactgcttgtcgtccatgttcagcccggcgaaatgccgggcattggtgtcatcgcgaaaacccacgtacaccgcgtcggcgccttggcgtacggcggctttcagcgcaggcaggttgcctgccgggcagaccagttgcatggtggctccttattgaaaatcggcaaacggcaggaacggcacggcggcgcccttgagcacctgctgctcgcgctcgacgatcaccagcccatcggcccagcaggcggcggcgagcatcgccgagctttgctgggggtgcaggattgcgcgcagctgcccatcgctgtcggggctcaagcgcgcacgcaggtactggcggcgcttgttgggtttgagccactcgaaggccgccggcacgctgacaggcaccggcaacacgcgctccacgccttgggcgcgcagcaggaacgggcgcaccacgatcagcgtggtgaccagcgcggcggtggggttgcccggcaggccgatccagggtttgccggccacttggccgaacgccaggggtttgccgggctggatcgccaggcgccagaactcgaccttgccgagtgcctggatcgcttgtttgagatggtcctcttcacccaccgacacgccaccggtggtcagcagcaggtcgcactcggacgaggccagcaccaacgcatcgcggctggccgccagcgcgtcggccatcacgccgtagtcgtgcacctccacgccccagccacgcagcaacgccgctacgaggtagcgattgctgttgtagatctgccccggcgccagcgactcgcccggctcacgcagttcatcgccactgctgagcaggcacacgcgcagtggccggtagaccttgacccggggaatgcccgccgccgccaacaggccgagttcctgggcgcgcaggcgtttgccggcgctcagtacccgttgcccgcgttgcagctcttcgccgcgcttgcgaacgtgttcgcccaggcgcaacggcgggcaccagatgcgctggccatacacccggcagcgctcctgcggcaccacgctgtcggcacccggcggcagcggcgcgccggtgaagatgcgcacggcttgcccgggctgcaacggcacatccgtgctgtgcccggcggcgatccgcccgaccacttccaggtaaccgccctgctccggcacgtcaaacgcgcgcagggcgtagccgtccatggcgctgttgtcccagcccggcaggtcacggggcgagaacacctcttcggcggtcacccgccccagggcatcggccaacgcaagcatttcggtggacggtggcggcggtgcctgggccagcaactgctcgatggcctcttccacgggcagcaggtcgccgctgtcgcagggactcatgagcgtgcctcacaagcagcgagtatctgatcgagttgcggcttgaggtgcggcgcaaaattgcacgggccggtgcggctgtccaactgaccaaccaggatctggtcccaggcagtacgacaggcccccggcgaaccgggcatgcagcacaccagcacgccgttgctgaaaccggccagggctcgggattgcagggtcgacatgccgatttccgccagcgatacctggcggaacaactcgccaaagccgtccacctgtttgtccagcaacggcaacaccgcctgaggggtgttgtcgcgcgcggtgaaaccggtgccaccggtcatcagcaccacttgcacctgggggtcggcgatccattgcgagacgcgcgcgcggatctggtagatgtcatccatcacgatgccacggtcgatcagcatgtggccggcacgttgcaggcggtccaccagggtgtcgccggaggtgtcggtgtcgtaggtgcgggtgtcgctgatggtcagcaccgcgatgttcagggaaacgaaactgcgttgggtcagatgggccatgatccaggctccaggcgttgaaaagatgcatccagcctgcgccgcatcgggcgcagggcctattcctcgaaggaggtatgccgtcagggggccaggcgcgtgcgctgccacccggcgtcatgcaggcgatagtcaagacggtcgtgcaagcggtccggccggccttgccagaactcgatacgttggggttgcaggcagtagccgccccagtgctcgggccggggcggctggcgcccggcaaaccgctcggtgacctcgcgcaggcgcccttccaactcactgcgatgggccagaggctggctctggggcgaggcccaactgcccaactgactggcgaccgggcgggcatcaaaatagtcgtccgacagctcggcatccgccttcgccaccggcccttcgatacgcacctggcgctccaggcccggccagaagaacgtcatggcggcatgggggttgtccgccagttcatggcccttggcgctctggtaattgccaaagaagaaaaacccgtcggcgctgaagcccttgagcagcaggatgcggcagtgggcatgcccctggccgtccaccgtggccagggccatgctgttggcctcggcgggcggcacttcggtcttgcgggcctgctccagccactggccgaacagctccagcgggtcggcctgcgggcagtcatcgcgcaggccgtagagggtgtagttgcggcgcaattgcgcaagggacaggggcatggggcggtcctccaggaagttcgccacagtgtgagaactggcgcgccgccgtcccttgaccgtgatcaacaatcgcccgcggcatgacgccgcatgccgcttaccacaacgacttggcgatgatcacaatcagcaccatgtgcaggaggatactgcgccgaatccaccgtgcacgcttggcgctcaggcgctgtttacccagccagtacgccagcagcaggtagtgcccgatgatgctcagggccagcaggactttcaggctcagcagccacgcaaaacgaccactccacggcatgccccagtagtgccaggccagccccagtcccgcgccgtacagcacgatgaccaccagatgcagcacgcgtcgcgagcgccgggcaatcgcctggtcgcaggtgaactgcgcggaccaggccaactcctcccgggcgctgtgccagatcaccacttcaaaaaacaacgtgccgatgaacgcgatggccgccagcagatgaaccatcaatagcactgaatacatggatctctcctaacccggatgcccgtccacacgcgcccgccacagcatcggcccgtagcgccacaggtacagccccagcccgatggaccagcacagcgccgccaaccacaatgccgccaccggccacaccagcaccgccagcacccggcacacacacgccaggttcagcaacgcaaaggccagagtcatccccgagggcggctgcaatggccggccggtatggcccaggctgacccgcgcgatcatcgccaggatcaacccggccatggcgccgatggtcagcgcatgcaccgccaggctcgggttgagcggcgcgccaaaatgccacagcgccatgcccaggcacgccagcgccaaccaggcataggccaggtgcagggaccacagcagcggcacccgccacaggccgcgagcatgccaacgcgccaggcgcaacagatggcccacgcccagcagcgcgaacagcacaccgatccaggcccgtggcaacaaggccaccccaccggcatacaacaacgctaccagcaccgaaccgcccaacagcaggtgatccaaccacggccagggcttgaccgccgcaacccgacccaggccgcgttgggtgaaaaacgggatcacccgtccgccgatcagccccatcatcgccgccaccaaccagaggccggtcaacactgcctggcgctgcaagccctggtcatacagtgccaagccatcagccaccgccagcaataccagcaccagcacaatcggataattgcgcgtctgtcgcacctgccacagcgtccatcccatcacgcccgccaccgccagtgggaagctcagttccagtaccgccagcaatggcaggggaacgttgagcaaccagcccacgcgcgccgccagccacagcgccgcgagtgcgcccaagggtgccccgctgagcccgggacgaccggtccaggtctgcaccgccgtcagcagaaaaccggcgatgatcgccaggccaaagccgaacagcagttcatgccgatgccaggccagccagccgccggccggttgccaactgccggtcatgccgcccagggccagcagccacagcggcaccgccagcgcggccaacaggcaggcaccgaggaaaaacggccgaaaggccaggcgaaacaacggggtaatcgacatggccttgcgtcgatccagtacgtgcatggcagggctcctgaatgtatcactgcgccgatggtgcacctgtacgcgcgtcttgcccttgtcgcagatcaagctgcgccaagggcaaccggattaacctcgacgcccctttccctttgtgccccgaggtaatgatggtgctccatcgtgtccatcaccagatcctgcgcagtcatcacctgttcgagcccatggacgagctccaactcaacgagctgatgagcagcagccagttgctcagcgtcgacaagggccagcccctgttccgccagggcgaaccggcggacgccttctacttcgtgattgccggtgcggtgaagatctaccgcttgaccccggacggccaggaaaaggtcttcgaagtggtcggcgagcgccgcaccttcgccgaagcgatgatgctgatggatacgcccaactatgtggcgtgcgccgaagccgtgtgcccgacccagttgtaccggctgtccaacgccacctacatgcgcctgctgcacagcaacagccgcctgaccttcgccctgctcggcacgctgtgcgtgcgcctgcaccagcgggtcaacgagatcgagaccctgtcgttgaagaacgccacccaccgcgtggtgcgctacctgatgacccagttgatgcgcctgccggtcggcgaaaaccgcttcgaactgcccatggccaaacagttgatcgccgggcacttgtcgatccagccggagacgttctcgcggattatccggcgcttgatcgacgaacagatcatcacccaggacgctcgccagatcgcgattctcgaccgcctgcgcctggagcaattcgagtgaggacctgcctgtattgccagcaccgcaatgccgtgcagcgcgacacctgcgagcactgcgccatgccgctgccgagcgccgaggccggccaccaggcgcggcggctcagccgtttccagtggttctgcgtgggcctcgcgttgttctgcatcgcgatgtttttctggctgccccgtgatatctactgaccctcggtgagttgtcggtacagctgcggcaaacgctcgggcaactgctgcggctggcggatcagcgtgaagccatgggcgccgaacatgtacggcaggtagtcgccggcctgcttgtcgatggtgatgcagaacggcaccaggccttggcgcctcgcctccagcaccgcctggcgagtgtcttccacaccgtagcggccctcgtagaggtccaggtcattgggcttgccatcggtgagcagcaacagcagtttgcgccgttgcttgcgggcgcttagcaggtgggtggcctggcgaatcgcggcgcccatgcgcgtgtagtaacccggcttgagggcctggatcaccccgcgtgtgcggtcatcgtaggggtgctggaacggtttgatcacctgcaggcgtacctgctgccgacgcagggacgagaacccatacagcgcaaagcggtcccctgcccctgccaggctttcgccgaacagcaacaggctgtcgcggatcacgtcgatgaccttttgcgtgtcgttcagatgggcgtcggtggacatcgacaggtctgccagcagcaggcaggccaggtcgcggtgggtatggcgctgctgcatgaacagcccgcgttcggcacaggcgccgtgctggcgctccacatgaaagtccagccaggcctgcaggtcgagttcgctgccctgggactgctggcgttgccattgacgctcggtgcgcaggtgctggaactggcgccgcaggcgttgggcctgggcgtgcaggcgcgcgggcagcgcttggggttgatcggcgcgtggttgcatcagttgcaggttgacgaaggcgtcctgcaagcattgccggcggtagtcccattcgggcagcttgatgccctcgccgagggggatgtcgtcgacatcggcgggcggcaggtccaggtgcagtttcagcccgccactcttgcgcacgcgctggcgcgacaggctcaggtggtcgaggtcttcggcgacgcgggcggcgtcggggtcctggctgtcgtcggtccagcggtcaagctcgacgtgctcggtccagctgaacaggttttccaggcgcaccaccagcaggccgccgtcgcgggcctggtcatccaggcgtgtggcgcgcttgggcgggccttgttgtgcgcccggcggcgccgacaggtcgtcaccttcgtcgtcgaggtcggcgctgtgcggtgcgtccagctgctgcggtgggtacagccataacggcaatggccacggggcgcgctcgctgcgcggcagttggcgcacgctaccgggttcgcgcagggccttgcacaaggctttttccagggctgcttcgtcgggtttgaggcccgccgggtcggggcgcaattccagatgggcatgcaccagccggcgataacggggcagcatcgccgggtagcgttgcagcaacagccaggtccagcgttgattgtcgcgggcccagtgggtcatggggccggcgtgggcggcgagcaatgccagccattggtacaagtcggcattcagcgccgggtcgggaaatactgccaggctgatcggcaagcgcaggcggttgccgtcacaggtggccagcggtgcctgtttgcaggtaccggcgatgcgcatcagcaggttgcgccgcagcaacaggtcgcgctcacaggccgcctccacggcgatgccgcccgccccaccgagggctcggaacagcagcgccacacggcgttgatggtcggccagggcaacccgcgcttcggggaaatccacactggcgcggcgtgtgataaagcggtgccaggcactgccgacccattcttcgagttccagggtaaaggccatgtcattgctccaaacgtaaaacggcccgctgtaccagccgggccgccctcttggggattaacgttgttgtctatacggcggggaccggctcaccgatcaccccgcgccgttgccggaagctgtacaggtagcagagcagccccagcaggaacaccacgccgctggccaaccgtgcccagaacagcgtattcaggtgctccaccgtggccatgaacggcagcgccacaccgtccaccggccagcgctgcaaccacacctgcacggcgccggcggcggtgaggaacagggtgatcatcaccatcgacaccaccatcagccagaagccccatacctcgatggtctgcgaacgcgcatccggcgcttcaccgaggccacgcaggcgcggcatggcgtagctgatcagggtcatcacgatcatcgcgtaggcgccgaagaacgccaggtgcccgtgggcagccgtgagctgggtgccatgggtgtagaagttgaccggggccagggtgtgcaggaaaccccagaccccggcgccgaagaacgccgtcaccgtggtgcccttggcccacaacgtcgccgcccggttcgggtgctggcgccgacggcgtttgaccatggtgaaggcgaacatcaccatcgccaggaacggcagcggttccagggccgagaagatcgaaccgacccacaaccacacctgcggcgcaccgatccagaagaagtggtgcccggtgccgatgatcccggtgatcaacgccatggcgatgatcacgtacagccatttctccaccacctcgcggtcgacgccggtgaccttgatcagcacgaacgccagcatcgagcccatgatcaattcccacacgccttccacccacaggtgcaccacccaccaccagtagaacttgtcccgcgcgaggttcccggggttgtagaaggagaacaggaagaacaccgccaggccgatcagcccggtcatcatcaccatgctcaccgtggtcttgcggcccttgagcagggtcatgccgatgttgtacagaaagcccaggcacaccaccacgatgcccatcttggtgatggtgggttgctcgaggaactcacggcccatggtcggcagcagttcgttatgggtcaatttcgccagcgcggcgtacggcaccagcaagtagccgaggatggtcagcacgccggccacggcgaatacccagaacaacaggatcgccagtttcgggctgtgcagctcgcggtccgcctcctcgggcaccaggtaatacgccgcgcccatgaagccgaacagcagccacacgatcaacaggttggtgtgcaccatccgcgccacgttgaacgggatcagcgggaacagaaagtcgcccaccacgtattgcaggcccatgatcagcccgaacagcacctggccgacaaacagcatcagcgcaaacacaaagtagggtttggccacggcctgggattggaatttcagatagggattggcgctgcgcatggctcagccctccttgttcggtggccagttgttggtgtcgatcttcgagctccatttgaggaactcggacagatcgttcacctcctggtcattgaggttgaattgcggcatggcccgacgccccgggacgcccagcggttgcatcttcatccaggcgtgcaggaacggcttgaacccttcttcaccgccccggcgctggaacacattgcccagctccggcgcaaagtaggcgccctcgcccaacagcgtgtggcagccgacgcagttattgcgctcccacacgcccttgccacgcaccaccgactcggtgagctggtcggcgttgctgcggacgggaaaggtctgttcggtgtgataggtcagggccaggaaaatcaggaagaagaacacgcttcctccgaagtagatattcctggccatgcccttggtgaaggtctctgacatggtcgtcttcctcatggcttggcgggggccatgataggaaggtggggttgggaaactgcttgatggcgatcaagaaagcctgatcggatgactgggtacatatccgttgctgcggtaatggccacttatggttccgctcttacagcggctcactttggaaaagccggaatgccggcccagcccaaagtaagcaaagggctcttgccccaaacactcggcacctcgcctaggctcggtgttccctcactccggccagcgtgtttgacggggcgaccccagatcaaaagcaagagcgcggcggccttagagccgaccggattgtatggccggtactcggtcaaagtgtgggagggggcttgcccccgatggcagtgggtcagtcactgatgagttggctgatacaccgccatcgggggcaagccccctcccacagtttgatcttcatgtatcagttgaagcccccggtgtcagggtagttgtcgtgtcctccgctttttaaaagtattccgggggcggcaagagtaaggtcatgcctttctattcagaagaacgcaaagctgcgctgttgaaaatgatg

SEQ ID NO: 11 - DNA, 76811 bp, Pseudomonas nodulensis
  misc_feature (42160)..(42234): n is a, c, g, or t
aatcactgtcgaattacgggcacaccgagcctaagcgaggtgccgagtgttggggcaagagcgttttgcttacttttgcgctctatcaaaagtgagccgccgtaagggcggaaccaataccagccatcacccaaataacggatatgcccccagacttaaaccaacacccccacacacccgaccaccacccaagcccaccccaacaccccccaccgccacccccaaggcgcatcccgcaattccatgaacccatccgcaatcaaccacgacttgccaaccgccaacagcaacaccccccacccaccagcgccccccgccaacaccgtccccacactcaacaaaaccagcaccacccaacacaccatcaacccctgcgacgcactcatccgctcctacctcatcacatacaccaccggaaacaacaccacccacaccaggtccaccatgtgccaatacagcacccccgactccaccccattcaccgccaccccaccccgccagcacaccaacgccagccacccaaggatcagcatgcccagcagcacatgcaggaagtgaaaccccgtcagcacccagtaaagggtgaaaaaccggctgtactccatctccaaccccacctccaccagatgggtgtactcgccaagcttgatccccacgtataccagcgccaccagcagcgccgcgccaaacagtccggcgctgcgctgccaatgtcccaggcgcacctgctgcaaggccaacgccgcgagcagcccggtcgtcaacaggctcacggtcatcgccagcccgctggaggtgtccagttgtgcgcggcccgaggcaaacaccacgggttccaggcgctgggtcacggcgaatgccaggatcagcatcgcgaacacggtcaattcggcgaggatgaaaaaccacatcgccaggtcacccggcaggcgccggggctcaggcaaagtgcacatccaccacgtccatcagcccggcgacggtctgcgggtcgtcgctcagggcctgggccaggcaagccatgcaggcttcacgcgggggcatgccggcggcgatcaggcgggcggtgaagatcagcagacgggtggaggcgacttcttccaggtcgtgttgatccaggcgccgcaacgcctggcccaggcgtaccacctcagtggccaacgcgttatccacctgcgcctcccgggccacgatgcgcgcttcgtccgccgccgccgggtagtcgaagcgcatcgccacgaagcgttgacgggtgctgggcttcatgcccttgagcaggttctggtagccggggttgtacgacaccaccagcatgaacgacggcggtgccttgaccacttcgccggtgcgttccaggtacagctcgcggcggtcgtcggccaccgggtgcaggaccaccgcagtgtcctggcgcgcttcgatgacttcgtccaggtagcagatgccgccttcgcgcacggcgcgggtcagcgggccgtcctgccaccaggtgccctgggcgccgatcaggtggcggccgaccaggtcggcagcgctgaggtcgtcatggcaggccacggtgtacagcggcaggttcaggcggtgcgccatgtgctgtacaaagcgggtcttgccgcagccggtcggacccttgatcagcaccggcatgcggtgacgccaggcgtgctcgaacagtacctgttcgttggcgaggggttggtagaagggtgtggtcatggccggtatccaaagcgggttcgacagccacgctaagggcgcctgcgacaacctggcaagcgctacccaaggcaaacttgatcgccgtcaagcgagcattccaacacgtcgccatagtctggccgggcactaagaacctgcgccccgcacctgttgcgtggcatcgcaaaggtctcgcctgaggagtacatggaatgctgactcgcacccgcaaaaccttcaccctgagcctcgccagcctgagctgcgcgctggccctggcaatgcccccgacggcccatggcgccgcgcaacccgcgctggtgaaaactgccggcgcaccggacatgagccaggccgacttcgacacctccaagcagatttacttcgaacgctgcgccggctgccacggtgtactgcgcaaaggcgccaccggcaaaccgctgaccccggacatcacccaggcgcgtggccaggcgtacctcgaagcgctgatcacctacggctcccccgccggcatgccgaactggggcacctccaatgcgctgaccaaggcgcagatcagcagcatggccaccttcatccagcacaccgcgcccacaccgccggaatggggcatggccgaaaccctcaagacctggaaggtgctggtcaagcccgaagaccggccaaagaaacagctcaaccagctcaacctggacaacctgttttcagtgaccctgcgcgatgacggcaagatcgccctggtcgatggcgacagcaaaaagatcgtcaagctgatcgacaccggctacgccgtgcacatctcgcggatctccgcctcgggccgctacctgctggtgatcggccgtgacgccaagatcgacatgatcgacctgtggcccgccgagccaaccaaggtcgccgagatcaaggtgggcatcgaggcgcgctcggtggagacgtccaagttcaagggttacgaagacaagtacaccatcgccggctcctactggccgccgcagttcaccctgatggatggcgaaaccctggagcccaggcagatcgtatccacccgtggcatgaccgtggacaagcaggagtaccaccccgaaccacgcgtggcggcgatcattgcgtcccacgaatggccggagttcatcgtcaacgtcaaggaaaccggcaaggtgatgctggtcaattaccaggacatcaagaacctcaccatcaccaccatcgacgccgcaccgttcctgcatgacggcggctgggacagcacccaccgctacttcctcacggcggccaacaactcgaacaaggtggcggtgatcgactccaaggagcgcaccctcaccgccctggtggacgtgggcaagaccccgcaccccgggcgcggcgccaacttcgtgcacccacagttcgggccggtgtgggccaccagccacctgggggacggcggcatttcggtgatcggcactgacccggtcaagcacgcgcagtacgcctggaagcaagtggcttcgttgaagggccagggcggcggttcgctgtttatcaagacccaccccaactcccaccacctgtacgtggacaccacgctcaaccccgacgccaagctcagccagtcggtggcggtgttcgatatcaaccacctcgacaagggctacagcgtactgccgattgccgagtactccggcatcaagcaaggcgcgctgcgcgtggtgcaaccggaatacaacaaggccggcgacgaggtgtggttctcggtgtggaacggccagaccgaagagtcggcgctggtggtgatcgacgacaagaccttgaagctcaagcaggtgatcaaggacaagcgcctgatcaccccgaccggcaagttcaacgtgttcaacacccaacacgatatttattgagcccaatcaacaagaggtccgccaatgaaaaatattctcctcgcactgctggcaaccgccgctgcgttcagcctgcaaccggcgctggcgcaagacgggccggccctgttcaagagcaagccctgcgcggcctgtcatgccgtcgacagcaagctggtggggccggccttgaaggatgtcgcagccaagaatgccggtgtgaaagacgccgccaccaccctggccagccatatcaagaacggcacccagggtaactgggggccgatcccgatgccgccgaaccaggtcacggatgacgaagccaaggtcttggccgagtgggtcctgaccctgaaataaccgccaaggagcgcgccatgaaagtctcgatgatcagttcggccatggcgctgcttctactcattcccatgcccgcaggcgcagtcgtggatgcccaacgattggaacatctgctgacccaggactgcggcgcctgccacggcctgtacctcaccggcggcctcggcccgccgctgacaccccaggccctcgccggccagagccgtgacagcctgatcgccaccgtcacccatggccgcccagcccgtgcgatgccgggctgggcgccgctgctcagcgcgagtgaaatcgcctggctggtcgaccgactcctgcaaggaagccccaccccatgatccgtcccaccctgttagccgcttgcctattgctgggcgcctgtacccaaccgacgttgcgcggcaccggcgacctgggcctggtgatcgaacgtaccagcgccagcgtacaaatcatcgaatccaccggcatgagcaccctggcgcgcatcgaaggcctgggcgatctgtcccatgcctcggtggtgttctcccgcgaccagcgccatgcctatgtatttggccgcgacggcgggctgaccaaggtcgacctgctgggccagcgcatcgaaaagcgcatcctccagggcggcaacagcatcggcggcgcgatcagccaggatgggcgcctgatcgccgtgtccaactacctgcccggcggggtcaaggtgttcgatgccgtcaccctggcccaggtggcggacattcccgccaccgccctcgccgatggcaagcgctcccgcgtggtaggcctggtggacgcgcccggccagcgcttcgtgttcagcctgttcgacaccggcgagatctggagcgcggacttcagccagggcaacgcgccacgcatcagccgtttcaccggcatcggcgagcagccctacgacgccctggtcaccgccgatggccgctattacatggccggcctgttcggtgaagacggcatggcccagctcgacctgtggcacccggaacacggcgtcaagcgcgtgcttgccgactatggccgtggccagaaaaaactgccggtgtacaagatgccccacctcgaaggctgggccgtggccgacaaccaggcctttgtgccggccgtgggccgtcaccaggtgctggtgatggatgcccgcagttggcagcagaccgctgccatcgccgtggccggccagccgatctttgtcaccgcgcggcccgatgggcgccagctgtgggtcaacttcgcctacccggacaacgaccgggtgcaggtgctcgacagtgaaacccaccagatcatcgccgacctgcgccccggccccggcgtgctgcacatggagttcaccgggcgtggcgaccagctgtggctgtcggtgcgcgacggtgaacaggtgcaggtgtgggacccgtatcgcctgaccttgctcaagaccctgccggccttgagccccagcgggattttcttcagcaaccgtgcgcaaaaaatggggtattgaaatggaccttgacctgctcagccgtcgactgatcgaccgttaccagcacggcatgccgctgtgcgccgaaccgtaccgggagatggcccgggtgctcgactgcactgaagccgaactgatggcctgcctgcaacgcctggaactggcgggtgccttgtcgcgcatcggcccggtgttcgaacacacccgcgccggcgccagcaccctggccgcactggcggtgccgatcgagcgcctggaacaggtggcgcagcgcgtcagccagtacccggaggtcaaccacaactacgcacgcgaacaccactacaacctgtggttcgtgctgaccggcccgcaccgccagcacttggaacaggtgctggcggaactggagaaagacaccggcctgccgcccctggacctgccgatgctcaccgcctaccgcatcgacctggggtttgccctgggagaacatccgtgatcacgccgctgaaccacgaacagatgctcgacctgcgccaatgcctggagcgcggcctgccccaggttacgcggccgtatgaggagttggcggagctgatcggcgcccatcacgaccaggtgttgcagcagatgcagcaatggcacgagcaaggcctgttccgacgggtcggcctggtgctcaaccaccgtgccctgggctttgtcgccaacgccatgctggtgctcgacgtgccggacgcgctggtggacgaagtgggcacgcgcctgggccgcgccgtcgggatcaacctgtgctaccagcgcccccggcgtttgccgcaatggcgctacaacctgttctgcatggtccatggccgtgaacgcgaagccgtgaccgcgcatatccaggcggtgttgcaacaacagcagctcagcgacctgccccaccaactgctgttcagcacccgcgcctacaaacaatgcggcggacgtttcgcaccgccgccgtcacaggtatgggcccatggatgatctcgatcgccaactgatcaatcgcctgcaacgcggcctgccgctggtgcgccagccgtggcagcaactggcgcaggaactgcacagccgcccctgcgagttgctcgaccacctgcatgacctgctcgaagacgacgtgctgacccgcttcggtccgatgttcgacatcgagcgcctcggcggcgccttcaccctcgctgcgttggcggtgcccgaagcccgcttcgaagcggtggctgcgcaagtcaacgcgctggcgcaagtggctcacaactaccgccgcgaataccactggaacatgtggttcgtgctggcctgcgccaccgaggcggagctggccgccaccctgtcccgcatcgaagccctcaccgggttggcggtgctcaatctgccgaaggagcaaacctaccatgtcggtgtgtatttcccggtctgacaacgccctggccctgcgcttgatcgccctgacccaaagcggcctgccgctggtggaggacccgtgggcgtggctggccgagcaattgggcatcagcgtcgaatcgaccctggacctgctcaagcgcttgcaggctgaaggtgcgatccggcgcatcgctgcggtgcccaaccactaccgcctgggctatcgacacaacggcatgaccgtgtgggatgtagtcgacgagcagatgccgcgcctgggcgaactgatcggtgcgcagcccttcgtcagccactgctaccgccgaccacgccgacccggttggccctacaacctgttcgccatggtgcatgggcgcagccgcgaagaaatcgacagctaccgtgagcacctgcgttacctgctgggtgaagcctgtggtgctgacgaaatgctggtgagcagccgcatcctgaaaaaaaccggcctgcgcctggccccctcgcactagaaggagtgccctatgctgcggatcagtcagtacttgcgtaccctcgccggccgctgcccgccgccgcgtgtgtctacacccggcagcgaccgcccgccggtggtgatctggaacctgctcaggcgttgcaacctcacctgcaaacactgctacgccaccagcgccgacagcgtgtttcgcgacgagctggacaccgaggcagccctgctggtgatcgatgatttgcacgcggcgggcgtgcgcgtgctgatcctgtcgggcggtgaaccgctgctgcgcgaggacctgttccagctcagcgcctatgcgcgtgacaagggctttttcgtcgccctgtcgaccaatggcacgctgatcgatgagcagaatatccagcagatcgccgacgcgcgcttcgactacgtcggcatcagcatcgacggcctggaggcaacccacgacgcgtttcgccaactgcacggcagcttccagcgctcgatgcacgccattcgcctgtgccgcgaagccgggatccgcgtggggctgcgcaccacgttgacccaggccaaccacgcgcaactgccgcagttgctggcgttgatgcgcgcttacgatgtgcagaagttctacctgtcgcacctcaactacagcgggcgcggcaggcgcagccgcttgctggatgcacaccggcagatgagccgtgacgccatggcgctgattttccagcaggcctggcatgacatcgaacagggtatcgacagcgatttcgtcagcggcaacaacgacgccgacgccgtgctgttgctgcagtgggtgcaccagcatctgcccgagcactacccgcagctcgaacacttgctgcatggctggggtggcaatgcctcgggcagcggcatcgccaatatcgacaacaccggcgaggtgcacccggacacctactggtggcagcactcggtgggcaatgtgcgcaacacccgcttccgccagctctggctggaccagcccgacccgttgctgctgcgcctgcgcgaacacccgcgccgcatcggcgggcgctgtgccgagtgccgctggctggcgatctgcaacggcaacacccgcacccgcgcctgggccgatggcgacctgtgggggccggaccccggttgctacttcaacgatgccgaaatcgcccggcatcccacaccgttgatcccttgcaccacccggtgacacaaccgggggcgcctacctgatgatgaaccaaggatgtctcatgcacacgccaaccgccctacccgccagtctgcacagccccttccaccccggtgaagttgccttggtcggcgccggccccggtgacccgcgcctgctcaccctgcgtgcctggagcctgctgatgcaggccgacgccgtggtgttcgaccggctgatcagcgccgagctgctggcgctgatccccctgagctgcgcccggcattacgtgggcaaggccagcggctaccacagcctgccccaagaccaactcaacgcactgctggaggaactggccgagcagggtcaacgggtggtgcggctcaagggcggcgacccgttcatcttcgggcgcggcgccgaggaactcgaatacctgctggcacgcgacatcccctgccaggtggtgccgggcatcaccgccgcctccggttgcagcgcctacgccggcatcccgctgacccaccgcgatttggtcaactcctgtcgcttcgtcaccggccacctgcagcgcgacggtgccttgaaactgccgtgggccagcctggccgagccgagccagaccctggtgttctacatgggcctggcgaacctggcgctgatcgccgaacacctggtggcagccggtctgccggcggatacccccgcagcgctgatcagcaacggcgcccgcgccgaccagcacgtggcgcgcggcaccttgcgccagttgccaaccctggccgccgactgcgaaccgggcgtgcccaccctgacggtgatcggccatgtggtgaacctgttcgccgacgccaccctgcattaccccgccagcctgtcggcaccgcgcgtcccggtggcggtatgaaacacctgctgctggtgccgttgctctggatcagcgcggcccatggcacgccggccgaggattacagcaagtattgccagagctgtcacggcctcaaccgcatcggcgccagcggcccggcgttgctcccggaaagcctggggcgaatcaagccggacgaggtgcgcaaggtcatcgaacaaggccgtcccgccagccagatggtcgggttcggctcgcagttgagcgccgcacagatcgacggcctggcgaacttcctgcaacagccaccggccacgccggccacctggggcgcgcaggacatccgcaacagccaccgcctgctggcagatctgcgcacactgcccagcaccccgcagcaccacgccgacccgctcaacctgtttgtggtggtggagtccggtgaccatcacatcgacattctcgacggcgatcgcttcaccgtgctggaccgcttcgccagccacttcgccgtgcacggcgggccgaagttctcgccggacgggcgcttcgtctacttcgcttcccgcgacggttggatcagcctgtacgacctgcataacctcaccctgatcgccgagacccgcgtggccctcaacacccgcaacctggcggtgagcaaggatggccgctgggtgctggtgggcaactacctgccgggtaacctggcggtgctcgatgcgcgtgatctgtcgttggtcaagaccctggagacgggctcgcgggtcagcgcggtgtacaccgcaccgccgcgaaacagttttgtggtggcgctcaaggatgtgaatgaggtgtgggagctgtcctacgcggcggcgcaccccacgtttgaaccccggcgtatcccggcccacgatgtgctggacgacttctcgttcaccccggattaccgccagttgctcgccacctcacgcaaagccggtggcggccaggtgatcgacctggattcgggcacggtggtcactgacattccgctggcgggcatgccgcacctcggctccggcacttactggaagcgcgacggcaactgggtgttcgccaccccgaatatcagcctggggcaaatcaccgtgctcgacccgagcacctggacgctgatcaagcagatccccaccctcggcccgggcttcttcatgcgcagccatatcaactcgcgctacgtgtggagcgatgtgttcttcggcccggataacgacgccatccacctgatcgacaagcagaccctgcacatcgcccacaccctgcgcccagtgccgggcaagacggcggcccacgtggaattcacccgggacgggcgctacgtactgctgagtatctgggccaccgacggcgcgctgatcgtctacgacagccagaccctcaaggagatcaagcgcctgcccatgaacaagccatcgggcaagtacaacgtgggcaacaagatcgagtttgccgagggcacgtcccactagtttcggccaaacagacccaggccgatgcggctgcaatcaccgtgcagggtgaacccctcttcggtgcgccgcaatcgaccgcgctcctgggcctgggtcagctcatcatcgccacgggcaaactggccgaggcccaggtagtgataaccggctgcttccaggcgctcgacacacaacagccccatggcggtgctttgtgcggcgcagcacagcgcctgcgggcattgccccgcgtatcgcgccggtggccgggcatagtcgaatacctgcacgcggtcaggctccagcgcgatcaggctggccaacttcgcctccaggctggccagggtctgccaggcgttgccgtagcccagatcgacactgaccgaacggaacccgaaggtgcgcgccgcatcgatcaacgactggatcggtgccggatcgcgataggtgtcctgggagagagggtcctcggtacaggcatccggcacaccgatgcacacccggttgaaacccagttcgcgcaaccggccgacgctggcccaatcactgtgctggggcgccaggtcgatggcgtagtcgccgcggtcatgctcaaggaaatgcaagcgctcgcgcagccgctgcatctgcatctgcacatcgccaatgggcgctgccccacgccactggaagtgctcaaccggctggcgactgcccaggccgccaccgatcaggcgtatctgctgcgccaggctgcggcggtaaacggcactcggcgtacctggccagtgcagggtcactgccagtggacgctgccgttggcggctggtgcgcaaagcacgggcgacatcgagaggaatgacggtgtgcatggcgggctccggatccggcgacgatgcgccattgtccggtgcgacgccacggcgcaccttgatgtgcatcaaaggctttaccaactgaggtaaaacatgcccttggccagcagcacgatggcgaccatatgcccgaacaggctcagatggataaagcgcaggtaagccgcactcacccggccacggcgcatgcgcagcatcgtcagcagaaagtgcagcagcacactggcggcgaggatcagcttgagggtcaacaaggtgccgaacgacgaggcgaacggcgcggccaacaccggcaggtaacgcaacccgaccatgcccagcccggcgccgaacagcaccagcaacacccacggcatcagcgcccgggcacgcacgccgataccttgctcgacctgcagcatcacccgcgccggcaactgccgatgcagaccgcccaggatcagcacttcgaaaaacactgtgccgatgaagatcagcgcggcgaacagatgggccagcagaaacaacaggtaaagcatggtggcctcgcaggtggcgtcaaggtgccagtgtgacgccttgacgccacctgatccttgataccgatcaagctaaacccgcacgccgagcatgccggcagtgatgatcagcgtcaccagcgcaccgacgccgatcaccgcccacgtcatcgtcgcacaacgcgcctcgctcaccccatggttacgcagcacgccgcgcaggccacaccccaggtgcgcgatcaacaggaacaccgccagggaataatgcggcaccagccggatgctccaggcatcggccagcaaccccactggttcggccacggcccaggcgtaatcggtgtcggtgccgaagtagcgcgccagggtaaataccgagttgatatgggaggctataaacactgccaggtaagcgccagacgcggtctgcaaggcgtccagcaggtcggcgcggtggacggttttggggcggatcagcaccaggccgctgagtatctggaaaaagaacgtgacgataaggatcggctccagccaaccgttgcgatacaccacccgcagcacttgcatcaccgcacgatgcgcatcgttgccgaaaattccgagcagatggttgaacaggtgcggcgccaggaacaccatcaggatcgccaccgacgcaatgccatgggcgacccgcagcttgatgtaggtgcgcgggtggtgggtgaagtcaatgctgggcagcgtggccgacaccatcgagaagtaggcactcactgccaaccacaggccgctccacacgacaaggtcgtgaccattgaccttcatcaggtacagcagcacgcccatcagcgtataggctggcggcgtggcaacggccaggcaggccaggcgcctggcaagcaccaggcgtgcactcatcatgggctgcacacccgtgacgaacacgcagtagaacgccaccaccggcactgcataggcactcaacatcagcgccagagtcaccggcccgccggccccgccaacatgggccaggttgctccactgcagtgcccaggggtaatagagtgcggcggcgaatggcagcagccacagccagtccaatcgggtgtgggccagcggttttgcgagagacattgttgcgtccttactcatggattttcccccgcgaccctacggactggcgcgagggaaacccaggtccaattccacgctttttgcctacaccactgcgcgttacagcaacgggatgctgtagctgacaatcaaccgtgtctcgtccttgtccgccgtgtcattgccgcgcaataccgcactgcgccaggtaaaccccaggcctttcaaggccccggtggggatcacatagtccaggcgcaggtcgcgctcccattcgctgttgtcgcggccggcggtgcggatatggctgccgtgaatgtaagtcacactggagcgcagccccggtacgcccaggctggcaaagtcataggcataactgcctaccgcggcctgttcgccggcattcacgaacttgagcgactgggagttggtgatcaggtaaagcgaacggccctgcccctggttgatgtgcgggaagtcactttgcccggtggttttctggtagcccaggctcagcgaatgcccgctcaaaccataggtgaacagtacgctccacaagcggttgtcgacgttgccggtgttgacgccgggcgcgtagtaacccgagccgacataaccttcgccacggcccgaagcactgccgttcttaccgtcggcggtgctgtagaaataacgcaggtcgctcttgaactgccccaccggcagttgccaggtgtgcaccaggcccaggaagtgctgttggtagaagttctccaggctggcgtagtagtactgcatctgcagttgcttgctgacggtgtaatccacgccgccgtagtagaactggttactggacttgcccttgaccgggtcattggcgccggcaatcgacaggccttgggcattgctggagttgcggtccacgacctgctcgatcttgcccgcgatcaggttgacgtccttgaagtccttggactccacctgatagccacggaaggtctggggcaacaggcgcccgtcttcagtggtcagcaccggcagcctgggcatcaggctgccggccttgagttgggtctgggcaatgcgcagtttgccggtaacgcccgtcttgctgaagtcatgggcggccttgccatcgtccagcgggaagacgctgccgggggtgttatcggcaccggacttgccggcccggccggaggcgtccaggcgcaggccgtaccactcttgcaggtccaggcccaggccgaccgtgccttcggtgaaaccggactggtagttgaacataaaggcctggccccattccttgtccgaggcggccttggcgttgcgggtgtcctggttgtagtagaagttgcgcaggtcgaggctggctttgctgtcatcgataaaacccgacgcagccgcctgctgcgcagcgccgatagagacggcgagcgccaggcaagtcttgtggttcatgaaggctccgagaagtgattgaggcgccccgtcgcagcgctgtttttgttgtgcctgggggctgcagtcaacgggagcgcgcacggtatagcgttgcgtggccgggaaaaagccggcaaaaccgccaatcactttttcagtttgggtaacaatccagcgaatggcgagcgcgtgtccagcagtgaggtacggatgaagtgcaggtaactttccacccggcgcaaggccgaggtctcaaagtgcgcttcgaaaggttcgacggtgtcctgcacgcactcgatcgcgtgttcgacgcgtgccagtgcacgttgccaccgtgcatgccccggctgggtgaacaagcgcaccaatgcccgccccatggcacgtaccgcctggcgccacgcggtggtttcggcgtagcaggccagcgccggcaactgcgcctgctcgcggcgcagttcgatcagggcatggccgacgtcaagcaccacgaacgtccagcgcagcaggcggtgttgcacctggggctggccggcggacaagccatgggcctggttaagcaggtcacgggtgccgctttcgaaacccgagcccagcgccggcaagggtgcgtggagggcgaacacgacccgctggcgcaggtcctgttccaaccgacgccacaaccacgggctgttgggcggcagaatgatcgcccctgccgccgcgcacaccagcatcccgaacaccatggcgaggtagtcattgatcaagccataagggttgtagagcgtgagattgccgggcaccgaactggtgccgaaaaacaccagcatgcccaggccgtagcccgcccactgtggtttggccaaccaaaacgaccccagcatgatcaccggcgcaatcactaggcacagtaacgggaacccatcgatccggggatagacgaagaacacctcgaaaatcccgatgaccgccgccaacaccgtcccacaggcaatctggaacgacatgcgccgggggttgggggagaacgccgagagccccaccgtgagcgcggacaccagggtcatcgccgcgccactgggccaactggtagcgatccacagcgcacacaacaccagcagcaccactgcggcacgcaggccggcgcctaccgctgccagccagtgggtctgtggctgaaaaggctcggcccaacgctcacgccggtggctgtgatcggtcagggaagaatgggtctgggcgtagctgtacaactcgtcgacgaagcgataaagcaactcgcaggccgtgtgaaaatccagcaagtcatcgttgggcggatgcgccagcaacagctcggagcgcaggtggcgaacctggctcggcagcccgtggatgtaacgcttcaggtgtgtcgacaggtgcgccgcatccaggtctgtgagtacctggccggcgaagggttgcagcacactgaccagcgccctgagcgccgggtccaccgcgttcagcaccgccgtggcgccgcgcatctgcactcgatcgagcaactgatgcaggacattgaaacgcgtggtgatggccatgaactcgacgttgagccgatccaggcgccccttgcgtcggcgcatgtaagggtcttcgaacacactgacgctgcgcatcccttccaggcccactgcctcggcgatgaagcgcaggttggcgacctcgaacgccgcctggtcgtgggtactgcgcagaccgctcacgacaaatccggcgaaacgaccaaagcgttggtacagggtattgcgcatggcggcgcccgccgtattgggcagcaacgttgcgctgatcccggtggcgcacagcacgcccagggtgatctccaacacccgccacaccgccgccatgaacacctgctccgggtgccccaccaccggcaagcccaccatcaccgcggtataccccgccagcacccacccataggcgcgaaaatgacgattgcgcgccgcgccgtatgagcacacgcccacccacacggccaacccggccaggaacagctcggtgctctgggcgaacagcgccatcaacagcaccatgaacgacgaccccaccagcgtgccgatcacgcggtagacgcttttggccaggacatgcccgctgtagggctgcatcacaatgaataccgtggtgatcaccgtgctgggctgcggcaattccagacgcatcgaaagccacaaggccaggtacgaagcgatcagcaccttgaacaggtagacccacatcaccccgtcggtgcgcgcccattccaggaagccccggcgccagggcagtgctctcagccggcgtgaaaaatcagtgagtggcggcacgaaacagggactcccgacaagctggctggcacacaaggccggcgactttaggcagttgcgccagggtcggtaagtcatccagaacgtgaatgactgttacgcaaaacaccacaataaatagcgtttacagcggcccgcgacttcatgccacactggaaaaatccgttatccctggtagccatcgatggacattctgcagaacatgcgcatcttccgttgcgtcgccgaagccggcagttttaccggcgcggccgcgcggctcaacaccaacaccacccatgtatcccgctccatctccaacctggaagcacacctgcgcacgcgcctgttcaatcgcaccacgcgccgcatcgccctcaccgaatccggccaacgctatttggtgcgatgcgagcagatcctgcattcgatcgcggaagccgaggtagaagccggcgacgcccatacccggcctatcggccagctcaaggtgcattcgatgaccggcatcggccagcattacgtggtggacgccatcgcccgttatcgccagcattacccggatgtgaccttcaacctgagcatgagcaaccgcacgccggacctggtgcacgaaggcttcgacgtatcgatcgtgctggccatcgacctgcctgactccagccatgtgtcgcagaagctcggcagcacctacagcatcgtttgcgcatcaccgtcctacgtaaaaagccacggcatcgcgcaggttcccaaggacctgctcgaccacgcctgcctgcgcctggtcagcccggtgatccccctcgaggactggaccttcgacggccccaatggcaaggaaaacgtgatcatcagccactcgcccttcctggtggattcggttgacgcgatgaaaaccgccatcagcaatgacatgggcgtcggcatcctgcccgtgcatgcggcgatcaagggactgcgcagcggcagcctggtgcgcgtactgcccgagtaccgcctggaggagctgagcctgtacgccatctacccttcccggcattacctggacgcaaaaatcaaaacctgggtggagtacctgcgcagctccctgccggaggtgctcgccgaccataaggctgtgctgaagacccgcccgttgctcagcgctgtcgagtcataacgactacatagggtcataacgactacaggacgccagggtcataacgacaacaaaaatcgcaaccgactgattttcataatgttattcattggcatgctttctgactctgaagtgggcaggacaaatcttcgaaacccacagagagatcactatgagcaatgaattcaaccagcgcctcgccgtcgtcaccggtgccagttcaggcatcggcctggccgtcacccaacgtttgcttgagcgcggcgcgaaggtggtcgcgatgtcgcgtcaactgggcgggcttggcgtgttggccgagcagtttggcgagcagctcaagtggttggccggggatgtgaccgaggcagccgacctggcgcgcctggcgcaggtgacggcgccgatggggcctgtggatttgctggtgccgaacgcgggcattgcccaactggccgatggcctggacctggccgccttcgaccggcaatgggcggtcaatggcgccggcgccttgaacaccttgggcagcctgcgcgagcagttgtcggcgcaggcgtcggtggtgttcatcggcacgttcctggagcaagtgacctttcccggcctggccgcctacatcgcgtccaaagccgccctgcgcgcccaggtgcgcaccctggcggtggaactggcgccccacggcatccgcctgaacatggtctcccccggccccaccgccacgccgatctggagcaccctggggctcaatgatgaagccctgggttcggtggcgaagaccgtcaacgcccgcctgctcgacgggcagttcctggaaccgggcgccgtggccgatgtgatcctgttccagctgggccagggcgcacgcagcgtgttcggccaggactgggtggtggacggcggctataccttgcgctgatcagaccagtgcaggcatggccttggcacctccgaatgccagggccttccaaccgatcaccaacagcgacaacccggcaaagatcagcccgcagccaatcaccccggtggtgccgaaggcattgatgaacagcccgcccaccgatgacccgatcaccaccccggcattcgccgatgacacatacaggctggtggcgaactcatgcgcctcgggtgccgaagacgtgagccagacttgcgtgaccaccaggccacaggtatgcgccgcgccccagagcaacacgatcacactcatcgacgcccacgacaggctgccaaaggcatacaacaccaggtatgccgccgccagtaccaccggatacagtacggccgtcacaaccagatgccggctgagcgcacgccccacccataggttaccgacgacgccgccgatgccgaagaccaccagcatgacactgatggtccgaccgtccatgccgatccgggtcttgaggtactcagccgcgtagctgtacaccgaaaacatcgtggtaaacaccagcacggtggcgaggatcgccagccacaccgagaggctgcgcagcacagtcagttgcttgccgaagctcaggggtgccgaacgcgggtgatcgggcagcttgagccttagacccaacgccgccaccgccgttgccacggcgcaaaagtagaacgaggcctcataggaaagactcgcccccacccaagtggtcagaggcacgcccaacaccagcccaagcgtggtgcccaccaccgccagcgccgtggcatgggccgctcgttcgcgggggtacagcgacaccgccgtggaaaacgcagcagcaaaaaataccgggtggagcatggccggcaccacgcgcagcgccatcagtgtttcgaagttcggtgcaaacgccgacaacacactgctgatcgagaaccccagcaaggcgcccaccaggattttcttgcgcgccacccgcgaggccaacaacaccaggaacggccccagcaccgccacgatcaacgcaaacaaacccatcaaccacccggcctgagacacactgatcgcgaaccgctcgacgatcatcggcaagataccgaccaccccaaactccagggtatacaggccgaacaaccccaggatgatgtagatcacgagccgacctcgatcacaaccttaccgaaggcaccgcgctgcaaatgggcgaaggcctggggcacttcggcaaagcggtaggtgtggtcgatcaccggttcgagggtgtgtcgctccaccatgcgaaccaggtcttcgagggcacggcgtggccccaccgctacaccgacgatggcggcgcgcttggccagcaggctcatcagcggcgcgctcaactggtcgctctccagcaggccgatcactgagacacgcccaccgttgctcaccgcttgcagtgaacgcgccaggttgtcgccaccggccatttccagcacgtgctcggcgccgcgtccgccggtcagttccagcacggcgtggtgccagtccggcacccggccacggtggatgccatgggtggcgcccagttcgacggcacgggcgattttttcatcgctgctgctggtgataatcacacgggcaccatgggccgctgccagttgcacggcaaacagcgaaacgccgccggtgccctgcaccaccacggtctggccggcgtgcaagtggccgagttcgatcaaggccatccaggcggtcaatgccgccaccggcaaggtgctggcctgggtggcgttcaacgagcgtggtgcgagcacgcaccagtcagcgggggtggtcacgtattcggccagcatgccggggatcgggccgccttgcggtggcgcgtcggcccaggacaacggcctgccgtcgacccagccggcaaagaaactcgacagcaccttgtcgcccaccttgaaccggttcacaccctcacccacggccaccaccgtgcccgccatgtcggacgccggggtgaaggggaattgcaggctggcgcccatgccgttttccgctacctcggcgtcacggtaattgagcgataccgccgcgacgcgcaccagcacctccccggccttgaccaccggtcgcggcacacgggccaagcgcaaggtatggaggccaaaggtcgggatttcccagcgttgcatcaagtcagtcatgttcaggtctctcgtgagggttttgcgcaaggataagaacctcgcttcacgggattaagtagggcgcggctcctgggtctacggagctttcattccgcaataccggcaattgcgctagggtatcggcaattcccgtcgccaatcggtgcctcagatggacaacctcacgaccctgaatgcctttgtgcaggtcgcgcatacccacagttttgtcgccgccgggcgggtgctcggggtgacggcgtcggcggttggcaagagcgtggcgcgcctggaagaacgcctgggcgtccggttgttccaccgcagtacgcgcagcgtgacgctgactgccgagggcgagctgtttctggagcgcagccggcgcatcctgcgggaaatcgaggaagccgaggcagagttgtcccaagtcagccaggcgccccgtggtcgcctcaaggtcagcctgccgttggtgggccatccgtttttgccagtgctggccgacttcaagcaggcctaccctgacgtcgagctggacctgagcttcaccgaccgccgcgtggacgtggtggaagaaggctacgacgcggtgctgcgcagcggcgaggcgccggattcgcgcttgagttcacggttggtgggggagtatcggatgatcgtcgtggcggcccccacctacctcgaacgtcacggcacaccgcagcgcttcagcgacctggcccagcacagttgtatcctgttccgctttcccaataccggcaagttgcagcgttggccgttgcacgcacaaggcgtcgaactcgaccagcacctgccggcagcgatgatctgcaacaacctcgaggcccgggtatgttttgcactgcacggcattggtatcgcctacctgccggacttcgccatccgcgaggccctcgacagcgggcaattgctgcaggtgctgcctgactgcaccgagcacggcagcttccgcatgatgtggccgtcgagccggcacccgtcgccgaagttgcgggtgtttatcgactttctcaaggaacgcctgtttccctgatcaggcgttgtcgaaccgctgccgcgcctggcgaaattcatcgcccttctctaccacccaggtccatagcgggatcatgtgtaccagcagttccgtgcccaggctcgacagctcgtactcgaccctgggcggcacttcctggaagtcatggcgcagcaccagcccatcgcgctccaactggcgcaacgtacgggtcagcatgcgctgggtcacgccctgcatgcgccggccgatctcggcgtgacgcaagcggccggacacacccagcacgtgcacgatgcccaatgaccagcggttgcccgcgtgggtcagcacctcgcgcttgaggccgtcatcgtcggcgctgagggcgtcgcaggcggcttgggagcggcggatgatctcgtcgttatccatggggagctctcggtatcacgggtgtgccttcttatgcgcggcgatgaattctgcaagcatgccacgactttcaatccagacggagttcctatgaccccctcttccatcctggtactcggtgccggcgaactgggcatggccgtagtgcaagcactggccgacctggccgcaccgggcgaaacacgcctcgccgtgctgctacgccccgccagcctgcactcggctgcggccaacgctttgcgtgcgcggggtatcgagcccgttgccggtgacctgcagaacgacagccaaagcgtgctcgccgagcgcttcgcgcccttcgacacggtgatctgctgcaccggttttgccgccggccccggcacccagcgcaaactggcacgggccgccatcgagggtggagtgcggcgttacgtgccgtggcaattcggcgtggactatgacctgatcggccgtggcagcccgcaggataccttcgacgaacagctcgacgtacgcgacctgctgcgcgcccagcacggcacgcaatggctgatcatctccaccggcatgttcaccagttttctgttcgagccctcgttcggcgtggtcgacctggcgcagaacaccgtgcatgcgctgggcagttgggacaccgccgtcaccgtcaccacgcctgaggacatcggccggttaaccgcacacatcgtgcttgccgaaccggcgctgggcaaccaggtggtgttcactgccggtgacaccctgacctatgggcaactagccgataccgtcgacgccaccctcggcatccggctgcagcgcgagccctggccggtgccgaggttgctggccgaactggcgaaggaccccgatgacaacctgaagaaataccgcgcagtgttcgcccaaggccacggcgtggcctgggaccccgccgtgaccttcaacgcccgccatcacatcgccatgacggacgttgccacgtggatccgccaacacctcagggcaccggcaaccatccgctgaattcaccccggttgttcaatgggcaccaggcgaagtccttttgcgcgccgggcaatacctggggttcgaccgccgcgcacggtgcccctttccaatcaaacagggttgcgccctgccaggccaggaccacacccctggcctggcttttatccgtctgcacccaacgtgcggcagccgccgccatgaacgcctcgatgggttcgtcatcgatctgcgcccgatactccgagcccagcagccagcggcagacgttcacgtggtaggtccaatccagcggcggccggtggcgataggcccaggtcatgaagctgcgaaacaggttcaggccctcgggcgggtccagcttgagcagcgccgggcagatgtcgaacagggtgtgccaatacggcagcaggcgtgcatccaggtgcacgaaactgcgggaattgctggggtattcaggcggcgccggttccgcgtgcaggcggcgggacgccttgctgaccaggcggcgggcgcctgcgggcaacaggtggttcatgaaacgcactcacagtcatgacgatgggacgcctcctggtttcaggaagcccaaggcaaacgtcagcgtgcaggggaagcgcgagggttggccgagggccaggaatagcgtggcggcgccttgttgcgccgttcatgggccgggcgcggggcgtgtcccaggcccaatagccaggccaggccgaccaggaacaccagggcaacggtcaatgcgttgcagaccgggcaggcaaagtagttcgagatgttgctggaagacgggctgcccaaccctttgtcggaaagtggcgcctggttgccgctcaccgaacagaacgccccgccgatgccattgagcgcctgccccgtcatctgcccatgccccaaaccgcagacgaacaggttcatgagcacgcagaagtacagggcccaggcgatcagcgaacggtcggggtggctcgatttcatggcggcgactctaccaccagcgccgcaaaaggatgaagcgcgacatgcccctgtggcagaacgtcgcagattacgtgggcttcccagggttggtagactgggcgccctcaaagcctgacgtattgatccagagcaatgcaggcgcttcacaggatgcacagttgatgagtacgttattcacccgccgcaaggtgctgaccggtatgggcctgttgggcctgggcagcctgctgggcggctgtgactacagccccaagctgaacttcaagtacggcaaggacctgagcgacaagatcatgggccgcaccttcaagctcaagaacaccgacggcgaaaccgtcaccctgagctcgttccggggcctgatgccggtggtgttcttcggtttcacccagtgcccggccgtgtgcccgaccaccctggcgcgcgccgcccaggccaagaagctgatgggccgcgacggcgaaatcatgcaggtggtgttcatcaccctcgacccggaacgcgacacgccggagattctcgacaagtacgtcaaggccttcgaccccagcttcgaagcgctgtacggcaccccggaagaaatcgccgtggccgccaaggaattcgggatcttctatgaaaagatccccgccggcgacacctacaccctgtcccacaccgccaccagtttcgtgttcgacacccgtggcaacctgcgcctgggcctgcaggcatcccttaccgctaaagagtgcgcagaagacctgctcaccgtcatggaggtctgctaatgactgccgttcaacacctcaagcgcacccttatcggcatgaccctgctgggcctcgccgcgcacgccagcgcccaggtgcaagtcaccgacgcctgggtacgtgcgactgtgccaggccagccgtccagcggcgcgttcatgaccgtcaccgccgacagcgacagccaattgctgagcgtggcctcgccggtggccaaggacgtgcagatccatgaaatgagcatgaaggacgacgtgatgcgcatgggcccggtggactcggtggccctgccggcaggcaaggccgtgaccctcgaccccgacggttaccacgtgatgctgatgggcctgaccggccagatcaaggaaggcgaccaggtgccgctgaccctgaccgtgcagaacgccaagggcgagaagcaggcgattgaagtgaaggcgccggtacgtggcctggatgggatggaccatggcaagatgcactgagacgtgcgcacccgcctcaatccacgataaatagccttgccccggcactcgtcgaagatcgatgcccttccatgtcattgcccacctggtaactcatcccggccgtcagcgtaaactgacggccgtcttccagttctgtgtgcaactcgccttcaaggcataacagcacatgcccccgccagcaccaatggtccgccaagtagccaggcgtgtattcgaccatgcgcacacgtgttgtgccgaagtggcaggtgcgccacagggcattgccagtgatacctgggtgaatcaccggttcgaccgtggcccagtctgtggtgccaaaaggaacagcagtgagatccatggcgagctctcgcgttgattgatgtgacttgaggctattcacaagacacggtggacggtagacacagatcgacccgttttacgggatacaggtatcctgcccgcacagagctcacggacacgctgatgcatatcgaccctgcctacatccttcacgaaaccgaacactggcggctcaaccatcatctggcatctgcgttgcccggctacctgatgctggggggcaaggcgccggtccactccctggctgacatgccggaaccggcgctggccgagttgggcgggctgctggcgaaggtccagcgggtaatggaggcgcagttggagccgaaatggctgtatatcagccggtatgggcacatgccgggcttcccgctgcatttccatttcatcccggtgtatgactgggtggaggatgcgttctggcgggatgagcgctatcggctgttacaacgctttggcactgcgcagctggcgcagaccgatggggccgagttgaccctgtttgtctggcgggagtttggcgagagcactacgcccccgtcgatccagggggcgtcagtcgagcaggtgattgctcgactgggcgcggctttcagggcactgtaaccgtcctcggctttgccacacgtccacagcatcctttgctcgcggggtggcacgtgttatctccagcatttcccactccttccatgaaatcatcgtgccattagcacacttgtgctaatcgacccctcccccctgcggcgctatattccccggcacttccaacgttccccaggcaccgtgcaactattgcgcgtgggcgtgttgtgcgctggaaaaaccataacaaccccaaggaagaagcaccatgaaactgcaatcctccgttacccgcctcaccctgttgggcgccctgatcatcggcgtggccggctgcagcaacatcaagcccaccgaagatcacctcaagacgctgtcggagaccaacctgggcgaaccggtcaagcgtatttccaatgtgcgcagcgactcgatgaccacctactacgtcgccagtgccgcctccggcgagtacaactgctcggtgcccagcggtgccagcggcggcatgttcgccgtggccagctttggcatgatgaaacctgcggcctactgccaacccaaaggtgcacgcggcaacccgctgcagggcttcacccagtaaccgtctgctggctcaggtcgcgcaaggtcccgcgcagttcggcgggacgcaccggcttggagagaatggcgatctgacggtcgtgcaaggcggcctggattctctccacgtcgtgcccggtgagaatcagcgcagggacgccccagccgcgttgctcgcgcagggcatcgatgcattcgatacccgtggcgtggttgcccaggtcatagtcggcgacgatgatgtcgcaatcgctgaccagatcacgccccgaagactcggcctgcaccgcgcaaccccagcgctccagcagggcctgggtggcgagcaggacgttatggtcatcttccaccaggcacaccttcaacccggtcaacagcccggcctggcgtgtgtcgtcgcgcggtgccgtggcgcgtggcgcggtggccagggtcaagccatacaggcttacagaagtaccatggcccacccgagagcgcaggcctacttgcacccccatcaactgccccaggcgcttgacgatggacagccccaggccgacgccttcgacgtccttgtcacgcaggtggcgtacccgatagaactcctcgaagacctttgacagatgctcctcggcaatccctcgcccccggtcatgaatctccaccgccaagccgccgtcgcgaatgcgcacgccgatcagcacaggtcgttgcgcgccatatttgaagcagttggacaacacgttctgcaccatggtcgccagcagcgcagggtcgaccagcacccaatgcgtgcagggtcgcaggcgcagctccaccccggcccagcgcgcggcctcggcgttctggcgcaccaggtcggcaaggaactcgcccagatgcaccgcctggtacttgggcagcaggcgaccgttgtcgagggtgtagagatcgagaatcgagcggaacaattgcgatacgttgagcagcgaacggtcgatgttatccaccaggcgccgctcttcatcacccagccgggcttcgcgcaggcaggcggtgaacaggccgatggaatggatgggttggcgcaggtcatggctggcctgggcaaggaaacgggatttctccaggttggcggcgatggcctgctcggaggccttgcgcgtgcgctccagcaggatatgcgcgtacaccgggatcaccgtgctggtgatcatcaacatcagcaccatgaagggttgcgcctgccacaccggcgtcagccgatacacgatcagcagtgccagcaaggccagcgccgtggcaatcgccaggtagcgcgagccgtagcgcatgccgttgcccaggttgacccacaccatcaccgcatacaacggcaacgccgcttcaccgcctaccaccatgccgaacgaggtgccggtgtagtcgtggatcatgccgaagatccgccgcgccgggtaatgccccggccagcgcacgatgacttggcgcaaggcaatggaggcgagcaggaacaggaagatatacaggatcaccggcaggtaggtgtccaccgactgtcccggcaggaagcccaatgcaccgatgtagacgattgcaatgctggcgaccacgatacgcagattggcctggtcgagttcggagttggtctcaagactcatggggttacgtccttgtgcggcaatcatcaattccttcacgcaccgcaggcaggcccgaggcacggtggtaaggtagcatgcaacggcacaaccttgccccagggaggagcaccccatgaccggccgtatcatcatcgccgatgaccacccgatgttccgcgaaggcatgctgcgcaccgtgcagcgcctgctgccggacgcgttggtgcaggaagccggcgacctcgacggtgtgctcgcgctgatccacgaaggcggcgagatcgacacgctgatcctcgacctgcgcttccccggcctgacctgcatgagccaactggccgaactgcgccagcaattgcggcgcaccacgctgatcgtggtgtcgatggtggacgacccggcgctgatcgatcaggtcatggccctgggcgcggacggcttcatcggcaagaacatcgcccccgacgagatcggccaggcgctgctggcgatccgcgaaggtgaagtgctggtcaagttcaccccctccggcctgctgccactggacacccataccctcaccgcccgccagcaagacgtgctgcgtctgatcgcccagggcaagaccaacaaggaaatcgccaaggccctggatatctcgccgtttaccgtgcgcatccatgtgtcgtcgctgctgcgtacgctaggtgtgccctcgcgggcggcggccgccgtgaagtatgccggagagttccagtgacaagccgtgcgtgagcccctctgcatccgatatttatgctcacttcccagcttaataatattttatttataccccccctccccctagccttgaagtcatgccaacgctgaatccaactgcattacgcaaggacagagacatgactgaagcactcacaaaaacagacacgctggtggtgggcgccggccaagctggcgtggccatgagcgagcatctgagcaaacaaggcgtgccccacctggtactggagcgcagccgcatcgccgagcgctggcgcaccggccggtgggattcgctggtggccaacggcccggcgtggcatgaccgctttcccggcctggcattcgataccgtcgccccggacgggtttgcgcctaaggagcgcgtggccgattactttgaagcctacgcgcgcaagttcaacgcgccgatccgtaccggcgtcgaggtgctgtcggtggtacgcaatgtcggtcgccccggcttcaccgtgcacaccagtgaaggggtgatcgaagccaaccgcgtggtggccgcgaccgggccgttccagaagccggtgattccggccatcgcaccaaaagaccctgcgctgcatcagatccactccgccgagtaccgcaaccccgcgcaactgccggcgggtgccgtgctggtggtgggcgctggctcatccggcgtacagattgccgatgaattgcagcgctccgggcgccaggtgtacctctcggtcggcgcccacgaccgtccgccccgcgcgtaccgcaaccgcgacttctgctggtggctgggggtactgggcgagtgggaccaggccgcgatgaagcccggccgcgagcacgtgaccattgccgtcagcggcgcacacggcggcaagaccatcgacttccgcgagctggcccaacaaggcatgaccctggtgggcctgacccaggcgttcaagggcagcgtcgccacgttccagccgaacctggtggaaaacctggcacgcggcgatgagaactacctggccctgctggatgccgccgatgcctacatcgaacgcaacggcctggacctgccccttgagcccgaagcccgtcgcgtcttccccgatgcggactgcatcaagaacccgctcctgcaactggacctggccaaggccggcgtcacctcgatcatctgggccaccggttttgccgtggactacagctggttgaaagtcgcagccttcgacgaagccggcaagccccagcaccaacgcggcgtggccagcgaagccgggatctacttcctcgggttgccttggcaatcgcgccggggttcgtcgttcatctggggcgtctggcacgacgccaagtacgtcgccgaccacattgccatccagcgccaataccttgaataccgcgaagccgccccggtggttcgcccatcccctgtcaacgcctgagccttattgccggagttttcctgatgcctactcacacccgtatccgcatgttcaacacgaaagaaacctaccccaaccagagcctcgacaacgacctgtgccaggccgtgcgcgccggcaacaccgtgtacgtgcgcggccaggtcggcaccgatttcgacggcaacctgatcggcctcggcgacccacgcgcccaggccgagcaagcgatgaaaaacgtcaagcaactgctggaggaagccggcagcgacctcagccacatcgtcaagaccaccacctacctgatcgacccgcgctaccgcgagccggtgtaccaggaagtcggcaagtggctcaagggtgtgttcccgatctccaccgggctggtggtgtcggccctcggccagccgcagtggctgatggaaatcgatgtgatcgccgttattcccgagtaaggagccgcacatgaccttttcgatcgtcggccgctgtgccgaaaccgggcaactgggcatcgccatcagctcctcgagcattgccgtgggcgcccgctgcccgtggctgcgcccaggcgtgggtgccgtgtcgacccagaacatcacgctgccggccctgggcccggacgtgctcgacctgctggaacaaggactggcccccgccgaggccatcgacacggccctgacccgcaacggctacagccaataccggcaactgacggcgattgatcacctgggccgcaccgtgcatttcagcggcagcgaaaccctcggcacacaccacgcggtatcaggtgagcagtgcgtggcggcgggcaacatgctggccgaccgcgcggtgatcgaggcgatggtcactgctttcgagcaaggtgaaggccaactggccgaccgactgctgacggccatgcacgccgcgattgccgccggcggcgaagccggcccggtgcattccgctgcgctggtggtggtgggcgaattgacctggccgatcatcaacctgcgcgtggattgggccgatgaacaaccgatcctcgcactgcaaacactctgggacgcctaccgtccgcaggtgcaggactacatcgaccgcgccctcgccccggaccgttcgcccggctacggcgtggccggagatgaccgatgagcaccagccgcgaactgctgcaatcgctggttgcgttcgacaccaccagccgtgaatccaacctgcaactgatcgagttcgtgcgcgattacctggccggtttcggggtggccagcgagttggtctacaacctggaacgcagcaaggccaacctgtttgccagcgtcggcccggtggaattgcccggcattgtgctgtcggggcataccgatgtagtgccggtggacggccagccctggacggtgccgccgttcgagttgaccgaacgcgacggcaagctgtttggccgcggcaccgccgacatgaagggctatatcgcctgcgtgctggcgctggtgccggcgttggtcgccgcaccgctgcgggtgccggtgcacatcgccctgtcctatgacgaagaagtcggttgcctgggcgtgcgttcgttgcttgcagtgttggagcaacgcccggtcaaacccatgctgtgcatcatcggcgaacccaccgaactcaagccggtgctcgggcacaagggcaagctggcgatgcgttgcgatgtacatggcgaggcgtgtcactcggcctatgcgccctatggcgtaaacgcgatagaacatgccgccgagttgatcggtgaactggggcggatggggcagcgactgcgcgatacccaggatgagcggtttgacccgccgttcagcacggtgcagaccggggtgatcagtggcggcaaggccctcaacatcgtgccggcggattgccggtttgatttcgaagtgcgcgcgttgccgtcgcaagacccgtccgaggtggcggacgaattgaaggcgtacgccgagcagcaggtgctgccgcgtatgcaggcagtgagtgcgcagagtgcgattcggtttaccgagctgtcggcgtaccccggcttggtcaccgacgagcgcagccaggcggcgcagtggattgcggcgttttccggctcgaaggaattcgggacggtggcgtttgggaccgaaggcgggttgtttgatgcagtgggcattcccacggtggtgtgcgggccgggcagcatggaccaggggcataagccggatgagtttgtgacggtggagcaactggcggggtgtgatgcgatgttggggcggatgttggcgtctgttcgcgcttgagcacttgggttcatgcagagcctggtaagcgcttgattttgtagtgagcgggcttgccccgcgcgaggcaagttcgctcactacaaaagcaaggcatgcctggatttagccaaggattcgggcgagttcttcttggcagtaatcgacaaacagctgcaccggcttggtcagcggcgcgcggcgcagccataccgccgacaggccggaaccagtgacggtctcggccaacggcacacacacgaccttttgcccgtcataggtgtactcggtgaacggcttggtcaccagaatcgaaaacccgaaccccctccccaccatgccccgcaccatttcgatcgacggcgagctgaacacgatattcggcgtcagcccgcgttcttcaaagatgctcacgaagtaggtgcggctgggcagcacgtccagcaggatcatcggttccagcaccaggtctgccagcgacaccttggcctgttgcgcaaagcgatgatcggccggcaacaacgcatagggctgctgcggcggcatcagcggcgtggtctcgatagtcgcgcccaggtcgtgctcgaacagcatggccacgtcgatactgcccgccgtcagcgcctgcaccagctcctgttgttcgccatcgcggatacggatttccacccccggccaacgcgccttgaagccggcgatcaggcgcggcaggtacagcggcgccacggtttcgaagcagccgatatcgatctgccccgccaccacgtcattgtccgccagggcgttctgctcgaactcgtgggccacccgcagcagctccagcgccttgcggtaaaagcgtgcgccgctgggtgtcagcgacacgccctgggcgtgatgacggataaacagctgcacgccaaagctgtcttccagctgcttgatcgccgtggataccgacggctgcgcgatatacagcttgcgcgacgcctcggcgacgctgccgcactcggcggtggtgacgaaatatctgagctggcgcaggttgtaggcagccatcgggacctccagaaacgtgggacttcgcccgtcaatcaggtgtaggcaacatacccgagcgcgacaagacgcgagctatattttttaaggtctatagcaacaaacttactaatttacctccccgcgcccattgcagatgatcactccaacaacaaagcgccgcgcaggtggcgcacagcgaagtacgtcaacgtactcaccttgccttggagctcgtcatggttaccactgcaacatcctccgccccgcttatcgaaaaacacacgattggatacgtgcccccggaagaccgccatggaaaggtcagagacctgttcaccctgtggttcggcggcaacatcgcgccgttgccgatcgtcacgggggcgctgggtgtgcaactgttccacctcaacctgctctggggcatcgtcgcgatcctcgttggccacctggtcggcggcgtgttgatggcgttgcactcggcccagggcccgcagatgggcatcccgcaaatgattcagagccgtgcccagttcggctcactcggcgcactgctggtggtggtgattgccggcgtgatgtacgtcggctttttcgcctccaacatcgtgctggcgggcaagtccctgcacggcgtggtcgacgccgtgcccgtgccggtgggcatcgtgatcggcgccatcggctccggcatcatcggcatcatcggctaccgcttcatccacgtactcaaccgcatcggcacctgggtgctgggcgccgggatcgtgctggggttcggctatatcttcacccacgtacagaccaccgacttcctgacccgtggtgaattcaacatctccggttggctggcgaccgtgtccctggcggcgctgtggcaaatcgcattcgcgccctacgtctccgactactcgcgctacctgccggccgacgtgccggtcgcctccaccttctggaccacctacctcggctcggccttgggctccagcctgtcgttcatcttcggcgccgtcgcggtgctcgccaccccggtcggcatggacaccatggacgccgtcaaactcgccaccggcgccatcggcccgttgatgctggtgctgtttctgctcagcgtgatcagccacaacgcactcaatttgtatggtgccgtgctgtcgatcatcaccctggtgcagacctttgcataccgctggattcccaccgccaaaagccgcgcggtgatctcgatcctggtgttggcggcctgtgcgattgccgcggtgtttgcctccaaggacttcatcggccacttcgtcgacatggtgctggtgctactggtggtactggtgccgtggacggcgatcaacctgatcgacttctatgcgatccacaaaggccagtacgacatcgcctcgatcttccgcgtggacggcgggatttacgggcgatacaacccacaggcattgctggcgtatgcagtggggatcgtggtgcagattccgttcatgaacacgccgctgtatgtcggaccgatttcggcgcatatcaacggggcggacctgtcctgggtggtggggttggtggtgacgtcgccgttgtacttctggttggcgagtcgggacagtgcgtataagcggcggatggacggagggaagttggtgggtggggtttgatgcactccctgtgagctgagtgatgaagtcattgtggcgagcgggcttggcccgcgttgggctgcgcagcggccccagtaaggttgaatgcggtgtgccaggcaggtctcctgtgctgaatttggggctgcttcgcagcccaacgcggggcaagcccgctcgccacaacagcctgctcgccacaggggatctgtgtcgctcgggtcgatgtttgtctatcatgtggcctctcgttcaatgcctcaggaaacgcccatgcccgccctcaccttgcgcaacgccctccccgccgacgccgcccgttgctttgaaatcgagaccaccgcctacgaaggcgacgaggccgccaccctggaaaagatcgccacgcgtattgcgcagtacccgcaaggttttctgatcctggaagcggctggcgaagtggtgggtttcatcaacggcggctgcgcccacaaggtggtgatgtcagatgaagcgttcaaggagttggtgggccactcggccgacgcgccgaatgtggtgatcatgtcggtggtggtcgacccggcgcaccagggcaagggttactcaaaaacgttgatgaccgagtttgtgcagcgcatgcgcggcatgggcaagcagacgattcatctgatgtgcaaggaacagcatgtggcgctgtatgagcgcatgggttaccagtatgtgcagccgtcgccgtcggatcacggtggcatggcgtggcatgagatggtgatggtgttctagccacccgggtcaaggcggcacttgtgtgtccggacgcaagcgcttgcaacacacatcgacaacgaccagccacgccacatccccctggatgacaccgccggggatgatgccgaagtgttcgaccccaatacgcaaagctggcaacccacccaggcggcgggcaaagggcaatatacgccgctgggagatccgtaccgcgaaccaatagattttgagatcaaggccgataacatgggaggatggcaacgcgcataagccagacgagaacccgtgatgacagccctccacattgaagtcagcgaccagcccaaccccgacgccgagcgtgtcctcggcgccggcttggcggcgttcaatgaggccatcacggggtataacgaccggcgcttgctggcggtgctgatcaaggatcccgacacccggcaaatccttggcggcatcaccggcaaaaccaccctgggcacggcgtttctcgatctgtttcatctgcccgacaccctgcgcggggcgggtcttggcagtcagttgctgcacgcctttgaagatgaagcccggcgccgcggctgtcgccacgcagtgctgtacaccctcagttttcaagcgccgggtttttacgagaagcacggctgggtgcgctttggtgagattccatgcgaaccggacggcagcagccgggtgtttctgtctaaggcgctgtgatgttttaccagctccctgacgccccgccgccgccactggaaccaccgccgcccgatgaactgctgctggaactggaacgggagcttccggagcttgagccggaacctccgccagaccccgagccgccctcggaaatactctggataaacacaataaacgccatgatcgacgcggccggtatcgccactatccagccctggtaaccctgccccagcaacacccccacggccacatagaccgccagcaccgccaacacacgtaacatgaaaaagcgcgggcgttttttccaggattcacggatgacgaaaaacagccccacgtataaccccagtaccaaggcgccgccaaacggccacaccagccaatggacgaaattgacctcgacgaagtggttcaccaccagcaccccgacgatgtacgccagcagccccaacacgctgtagaacaccccacgcgccagccacagtgagccgaacgtggcgccgccgatcagcaacgtcagcggcactacaaacaggtacatcggccaatcgcgcccgccgccatagatcgtcaggagtactgtcaccaccgcggtggcaatcaacgcgcggcgccaatgcagcttgccggcggcgatgagcacaccgccgatagcgccgatgacaaacgccagcagtatcgcaatgaactgcggattgagccccggccccgcaatcgcgggcaagtcaccaccgtccaccagcaccaccaggtcgttcacgccctgggagacgccgcccacaaaatcgccctggcgaaacgccggggtgatgtgctcttcgatgatgcgatgggccaacaggtcggtcactgtgccttccaggccatagcccacctcgatgcgcaccttgcgatcatccttggccaccaccagcaggatgccgtcgttgatgtccttacgccccagcttccaggcacggaacagttggttggcgtagtcctcgatactcgcaccacccgtggtgggcacgagcagcagcgcaatttgcgcgcctttgcgctgttccaggtcggtgagctgttttttcagacgggtggcagtggcggcgtccagcgtgttggtgaggtcgatcacccgctggtcgagggccacgccgatgggcgaatcctgcgcatgggccgcgctcaacacgccgataagcagcagtgccaccaggcccaggatcgattgccgcaaaatcgccatcatgctttgttacctgaagtttcttcctgaaggcgccgactttaccttatcaacgctataacgcgtgaccccacggcgttgactatctaaactgaccgtatacatagcaatacgccataaccgggaaatccatggatctacgtcagcgcaacaacgtcaatgtgatgggcaccggcacgtcgaccctggtgttctcccatggttttggctgcaaccaggccatgtggaactacctggcgccgcatttcctcgagcgttttcgtgtggtgctgtacgacctggtgggcgccggcctgtctgacctgagcgcgtacgacaaagacacatacagcacgctggacggctatgcccgggacctcaatcagattatcgatgcccatgccatcggcccggtgattctggtaggccactcggtcagcgcgatgatcggcaccctcgccgaccgccaggccccggggcgtatcgccgcccacgtgatgatcggcccgtcgccgcgctatatcgatgacgacggctatgtcggtggtttcaaacgcagcgatatcgacgacctgctcgacaccctcgacagcaacttcctcggctggtccagcgccatggccccggtgatcatgggcgcgcctgatcaacccgcattgggcgaagagctgaccaagagcttctgccgcaccgaaccggatatcgccaagcagttcgcacgggtgacctttatgtcggacaaccgccaggatgtgatcggcctgaccatcccggtgctgatcctacagtcgaccgatgacctgatcgccccggtggctgtcggcgaatacctgcacagcatgttgcccaacagcacctatcacttggtggacaacgtcggccattgcccgcacatgagtgccccccaggcttgcgcggcggccatggacagcttccttgcgccgtggacaactgcacgtgccagctgatctgttcgacagcgccgcctgcgccctggccgtcacctcggaagatggcaccctggtgcaaaccaacgcacgcttcagcgaatggctgggcttcagcgccgccgagttgtgcagcaagcgcttccaggaccagctgaccatgggcggccggatttttcaccagacccacctggcgcccatgttgcgcatgcatggcagtgtcaacgaggtgaagctggacatgctgcaccgtgacggccacaagatcaccgtgctgctcaacggcaacaagcgcgagcaggccgacgtcgcggtgtacgacctggccctgttcggcaccaccgaccgcgacaagtacgaacgcgagctgctcaacgcacgcaacctggccgaagcgctgttgcaggagaaaaccgccaccgaactggccttgcagcaagcccaggccgagttgcgcgaggcctatgcgatttcccagcgccgcgcattgttcgccgagcagatggtggcgattgtcagccatgacctgaagaacccgctcaccgccatccgcatggcctctgactttctcagccgcagtgaacgcacggccaaggaacgccagttgctggggcatatcggccagtcgtccgagcgcgcccaacgcatgatcgccgacctgctggacttcacccaggcccgggtcggccagggcatcactatcaaggccctgccgttggacttgcatggcgtgattcatcgcaccgtggacgaactgcgcgtggcgtttcccaaggcgacgttggaacatcacgcagaaggccatggcgacgcctgcctggatgccgaccgcgtgcagcagatcatcggcaacctggtggccaacagcgtggcctatggcgacctgcaacgaccgatccggattacctcacgcctgggcgttggcggctgcgaagtggcggtacacaaccacggcgcggccattcccgaagcgttgctggccgggctgttcgaacccatgacccgaggtaccgaccagggcagtgatgtgcgcagcgtgggcctgggcctgtatatcgtgcgcgagttggccagggtgcacggcggggacgtgacggtgagttcctgtgctaccggcggcactacctttaccgtgacgtttcagagtacgtaggcgctgccttgcatcaccggctcgacactgccggtcagcaccacaccgccctcacccgcccagtgcacggtcacgatgccgccgtcgcactccacctgcaccgtggcatccagcaacccgcgccggatcccattgaccaccgcgccgcagcagcacgagccggagcccagcggcacgccgccgccacgttcccagatgcgcaggcgaatacggccgcggtcgagcacctgcacgaaatgcacattggtcttgtccgggaacaaccgatgtttttccagcccagggccaacggcggcgatgtcgattgcgctgaggtcatccacgaaaaacgtacagtgcgggttgcccatgctgcacgcggccgggccaccctcgataggcaacacacacgtgtccatggcctcggccagcggcactgcatgccagtccagcgacggctcgcccatgttcaccgagacttgccgcccgggggcacgtacgcaggtcagcaggccccggtcggtacgcaacagcaccgaatccgtagcagcctcatgcatcaagcgatcagccacgccacgggtcgcgctgccgcaggtggccagcggcgtaccgttggggttccagaacttgatgcgcgcggcggcatcatcgcagtcgagtaccacggcaagctggttgaaaccgataccggtgtgacggtcgcccaggcggcgggcgatctgcgcggtgatggggtcgtgcaagccacggcgatcgatgatgatgaagtcatcgccatgggcgtgcattttcacgaacggcaaaagcatcggttgtcctgtggtcgacctgtgggggaactgaaggatactctgaaccggcccactcttatgagacccacctatgctaattgtcttcagtggcctgcccggcaccggcaaaaccacgattgcccgcgaactcgcacgccagaccgcggcggtttacctgcgtatcgacttgattgaacaggctatacgcgaggccggtgtgctggcaggggacgtgggtgccagcggttatggcgtggcgaatgcactggcgctgagcagtctgcaactgggccacaccgtggtggcggactgcgtaaatccggtcagggaaagccggcaagcgtggaaggccgtcgctgcagcagcaaaggtggcattactgaatgttcgggtgatctgctcagaccagcaggaacatcaacgacgggtggaaacccgcacgggggatattcccggcctggttccgccctcctgggcgtctgtgttggcgcatgagtatgaggtttgggatgaagtgcccttgacgctcgataccgcctgcatgacaccggagcaagccgtgacaacaacgatggcgaacctcacctctgtggcgagcgggcttgccccgcgttgggnnnnnnnnnnnnnnnnnnnnnnnnnnnnnnnnnnnnnnnnnnnnnnnnnnnnnnnnnnnnnnnnnnnnnnnnnnncccaacgcggggcaagcccgctcgccacaacaggcctgctcgccacgaggttgagccgcctacaacacgctgcccatcgccttcatcaacaccaggtcccgcccatagatatccggcgcatacaccaaaccgccctcacgattgacctccaccgtccagtagctcaacaacaccggcaccggcgtggccagcctgaattcgtgggtcacgccggtggccagcagttcatcggtgcgcgcacgttcggccgggctcaccagcagatcgcgcaagagcagcggttgctcgacccgcacacaccccgaactgaacgcccgtggccctttggtgaacagcggctggctcggcgtgtcgtgcaggtacaccgagtacgggttgggaaagcgcatcacgatcttgcccagcgggttgcgcgggccggcctcctggcgcagcaggatattaccggggcgcgcccagtcgatctgttccggcgccagcgggtggccttcggcatcgagcacttgcaggttctgctggcgcaggtattcggggttgaggcggatggccgggagtttgtcctcgcgcatgatggtgggcgggatggtccaggtggggttgagggtcagccgggtgatgcgggatttgagcaacggcgtctggcgctcggcgcggcccacttgcaggcgggtctgccacaccgggatgccgctctggtacacgctgagttgcgcggcggcgacgttgaccagcacgccttcaggctccaggtcctgggccaaccagcggaagcgttcgaggttgatgcgcagttgttcgcgccggatcgccgggctgatattcagctcggccaccgtaccggcgccgatcacgccgtcagcctgcaacgaatggctcagttgaaaggccttgaccgccttgaccagttcgtcgctgtactgcttgccgccgggggccttggccaggtaacccccaccgatcaggcgccgcgccagttccggtacgcgcgggtcgtccatgccggggcgcaacagcgggccgttggcgaccgggtcccaatgtggcaatggttgctggcgcacagtggaataggcattgcgcaggctgcggtagaggtccgcgctggggcgtgcctgatcgaacgcctggggcatgtcctgcaggccggtggcggcaaaggccagcacttcaacgttggcgtcgcgggtcggtggctgggaatgccacaggggctcgaagcgcgattgctgcaggcgcccgtagtgcagatcctgcagggcttgcaagtagtgctggctggtcgcgatgtcgctgcacagcacgttggccgtggcatctggcacaggcaggctatagtgggtggggtccaggccgtcatcggcgagcatcagcaactgagattgcagggcttgccggcgctcgtcggcggaccacaacggcagattcccctgctgttggtagaacgcttgcagacgcagttgggcggcggcgtcaatctgcggcgccaagccggggcaaacgctcggcaattgcgccaaggcctgctgcaccggcgccagatcgaccggcgcaggtgttgtcaccggcaacggctcgaccggcagcgcgtcggctgtcgcgaccaatggtgcaacgagcaggcaaatgctcaagtaacatgcgtgttttttgaacaattgacctggctccaatccacaccgggggatactttgtagatgctgacttttatgcgccgcctcggcttgatctccgtgacgctggctacgctgagcaattttgcgctcgccgctaatcagacctctcctaacttgtatagcagcctggcgcgctcggctccagaactcaatcccactgtactcaaaagcgccctcaacgcggtgcagtgcgcggtcaataacggcgaggaacgctccgaacgcctggcggtcattgactactcccagccttcgaccgcccgtcggctatggatcttcgatttgcgcaagaagacccttgttctgcgcgacctggtggcccacggcgccaagtccggggaaaacttcgccacccagttctccaacctcgaaggcagccaccagtccagcctgggcttgttccgcacccaggaaagctacctgggcacccacggttactcgttgcgcatggacggcctggagccgggtttcaatgaccaggcccgcgaccgcgccatcgtgatccacgccgccgactacgtaagccccctgtggagcaagcgcgaaggccgtatcggtcgcagccagggttgcccggccgtgcgcccgcaggtggcccgtcaggtagtggacaagctcaaggatgggcagttcatgttttcgtggtaccccgaccagcgctggttgaagtcgtcgacctacctcaattgcaaaccccaacaggtggcgagtagtcgtacaatccgtggcggatagcctgtccccatagataagagagcgccgcatgcttctacataagtccacctggatcgagatcgggcagtttctggaacgcagccgcacggtggtgattcccatcggttccaacgaacagcatggccccaccggcctgctcggcaccgactggatgtgcccggaaatcatcgcccatgaggcgcagcagaacgcggatatcctgatcgccccgaccttcaatatcggcatggcccagcatcacttgggttttcccggcaccatttccctgcgcccttccacctttatcgccgcgattggcgactgggtgcgttcgctggccgggcatggtttcgagaagattctgtttctgaacggccatggcggcaatatcgccacgattgaagcggcgttttccgagctgtacgccgaagcgagcttcgcccgtcgccccgccggctttgcgttgaagctggtgaactggtgggacctggagggcgtaaccgacctggcccagcgccaattcccggtgggccatggcagccatgccacaccgtcggaaattgcggtgacccaatgggcctacccggacgcgatcaagaccgccgactactcaccgcaaatcgccaacaccgggccgatccgcgaggcgctggacttccgcgcgcgcttcccggatgggcgcatgggctcggacccggcgctggcgacggtagaaaaaggtggggagttggtggcgttggcggcgcaggggttggtcaagacagtgaacagcttcagctacgaagccaaaccctgagccatacatagatctacatgtggaagggggcttgcccccgataacagtgtgtcagctacagatgctctggctgacccaccgctatcgggggcaagccccctcccacatgtggctttatgtatggcctgggattactggcagtcctttgccgccagctctagccgcgacggcgtaatcgtcgacgccaacggcttgcgctcatacaagaacaccttggcgccctctccagccttgtaggcttccagcacgtcatcggcggcaatcttgctggtcagcaccactttggcgtgacgcgagttctgggtgacggtcgaagtgatcccgtgtttttccagcttgggcagcacgcactgcacataggcttccgggctcttgctggtttgcagggtcaggctcggggcattaggggcggtgacacaacccgccaacaccagggaagcaatggccaaggccggggcgaaaaaagcgcgcatgaaaaattcctgactataaaaataaaggttcacatcaaccggcacggaccaacgctttgagcgacgcatcgaactgcttcaaggcatcgagttgcacatcacgctgctgctcgatctgcgcggcaatctccggcgcggccttgtcatgtacccacaccgatggcacccgcttgtgcaccgagccttcggccctggcgatgtactgcaggttcgcgtcatagaaccgcgcaataaaacgcgcctcgaccacatcgttacgctgggtcagcagttggttgtgggtatcgagcatcaccaccacatcggggtgtgcctgcaccagggcatccaggttgtcgtagaccgttactgacaaaaaggtgccctgcagcgagctcatcaaccaatcgatggccagttccgggtcggaactgttgacgaacgcctggcggatacgcccgtcgagggcatccttggcgccattcaaggccatgtcgtggtagcgttcgaggtagctgaggttgtcgcgggtgttgtcgctcaacaacacacccaccgactgcgcgtgctgcagggagtctacgctaccgttgataggtagcaaatggctggtatgcagatcatcggcgattgccgcgttgttgacgaccaccgtgccaagcatcagagccatcaaagccaactgaataaacgtcctcatcgcgcatttccttgaacagcgtctcgatggggcgattttccgcttttccggaaaaaacagaacttgcgatgcgtgatggtgactattatctgaaccgatagtgctgacataaaacctataaggaccacgccatgaagccccaccagaaaaccttcgaccgcatccgcgaagccgtactaccggagtttcgcgagcgggtcgccgattacctggtcgactatgaacacgtgctgcaggacgaggcggcggacgcggatcggatcagcgccagcgcccagcaactgcgcggttacctgcgcggcctgaacaccacgcgggtgctgggtatggccgactgggaggagctggaccgccgtgtgaaagaggattggctacgggtggtcgaagccgaataactgccggggtgtatcgatcagcaaggcctgcgcgaccgctgccgaccagcccagggcctggcgctgctcgatcactacgcggtagccgatggtggtttcatgctgggtgtgcggccagtcactgccccacaccaagcggtgcagaccgaaactctgctgcaacaacggcatggcctggcgcgcaaactcaaggttctgcgccgggctgccggccaggcgatagatccccgagaccttcagccacaactggccgctgaggcccaagcccagtaactcggcaaaaccgcgctgcgcgacgccgagtcgtgcatctggccggccgaaatggtcgaccaccagcttgaccccgaacggcagcaactggcgcaccaattgcggcaggtcgtccacctcgcggtgcaactctacgtgccagcccagcacgacgatgtgctcgaaaaaaaccttccagccgggctcggcaaagtctggcagcgcccggcccaccaggttcaagcgcacgcccaccacgccggcgcgggccatcgcctgtaaagcgtgctgcgggatatcacggtccaccaccacgacgccgcgcaactgatcgggtgcctgctgcaaagcggccaacaggtagccgttgtcggtgcccaggaaactgggttgcaccaacacgccgtggctcaggccattggcgtgcaagtggccgatgtagtccgccagcgtggcgtcgtagcctggagtgtagcgacgctcaccggccagggtcagcgcctggctgaatacatgggcgtgggcgtcgatgccggtgatggaacggttatcaagcatggggtcgtctttcaaaagtaaaaaggatcaggcctgggcgcgctggccgctcacgacgcgctcggtgggtgtcgcttccagcacgcggccacgggtttccggcaggcacagcgcggcgatcacggcgacgccgtaggcgatcccggcatcgatgccgatggccgagccgagggacatcgagtcgctcatatgccccaccaggaagggaaacaccgccgacagcacgcgcccgaagttgtagcagaagcccacgccggcaccgcgcacatccgccgggtacaactcgttgaacaacgcccccaggctggccgggataccggcggcgaagaaccccagcgggaagccaaggaacagcatctgcgtattgctcagcggcaggaacacataggcctgcacggtgatcacgcagcacagcgcaaacagcacgatgttcttgcggcgaccaatgcggtcgatcagccagccactggcgatgcagccacaccagaaggcaaagatgatcaccgccaggtagccgcccgagttgagtaccgacaggttgcgctcggtcttgaggaaggtcggcagccaggtcatcaccgcatggtaaccaccgtgggcacccaggcccagcaggccgccgaacagcgtcacgcggatcagctcagggcggaagatgccggccagggacttgaagaaactctggggaatcgcctgctccttttgcaggcgctggaagctgtcaggctcctccacgttgcggcgcacccagataatcaggaacgacggcagcagccccaccacgaacattacccgccaggccatgtcctggggcacaaacgaatagatcagcgcaaacaccccgaccgccacgccccagccaacggcccaggcgctctgcacggtgcccatcaccttgccgcggtacttcgggttgatggtctcggccatcaacaccgcgcccgccgcccattcaccgccgatgccgaagccttgcagtgccttgacgatcagcaactgatgaaagccggtgacgaacgccgacaaaaacgtgaagaacgaaaaccacaggatcatccactgcaacgtgcgtacccgaccgtagcggtcggacaaggtgccgccgacccaaccgccgatggccgaggtcaccagcgtgacgccgctgatcagccccgcatcgcccttgctcaaggcgaaggccgcgatgagtgccgggatcgccaggccgaacatctgcacttccaatgcatcgagggaccagccgccgaagcaggcccagaacgttttgcgctcccgaggagtgacttggcgataccaactgaacatgatttttatccttataggtcaaacgcgaggcagccgggcgcgaaccgcgccacagccgggccagtgttgggcaaacaattaacggtgcgggtgtgcggtcagcgaatgtccacgcggtagcggaagtgttcggcatgcccacgggagcgtcgccactccaggggttggccggcgtagtcgcgggccagacgctcgatcaccaccaccgggctgttgaccggtacttgcagcaaccgcgcgtacaccgcgttgaccgattcggccgtgagggtttcctcggccgaggccaccacctgcccgcagacactctcatacaccggatagagcagcgggccttgcgcggacaggtctatgtcgagcaaggcctggaagcgcgcacgcggcagccagatttcttcggcgagcagcggctgcacgtcaaacagacgggtccgaacgatgcggatcacttgggcctcgggggccaggcccagcgcctcgctggccgccgacggcgcggccacggactcgaccgtgaggatgcggctttgcggcacctgacgctcgcccgacgggccttgaaaacggaaaaacctaaacagcgacgactggaattgcgggcggcgcacaaaggtgccacggccctgctgacgctccagaatgccctcgctcaccagcgcatccacggccttgcgcacggtgccggtggacagcgcatactcggcggacagcaccgcttcagtgggaatcgcttcgccagggcgccagcgattgttggcgatctgctcgatcagctggtcgcgcaagcgttggtaaagcggcaggcgggcatcactggacagcgtattcatggggtcacattcactttgttatgtagtcatatatatgaatatgaccggagtattcttccgtcgggtgacgcctgtcaagcgcatcaccgcaaaaggaagatgaatggtcgttactgcgtcgggcgttgttgctgcacccacgcttgcacggaaggccgctgccactggcgtcgggcgtactccaccaactcggcaggcacgctgtcaccgttgaggatcaggcgattgagcatcacggccaggtccacgtccgcgatgcaccactcaccgaacaagtacggcgggttacccgccaacagcgcctgggtcgcactgatcaacttcgccgccgccgcttcagccactggcgacagtgcgggcatcttctgcccatagaacaccaccatcgtcgagcgctcctgacggatcggtagcaagtcactgcgcagccacgcctgcacctggcgcgccctcgcccgctgttttggatcggccgggtacaccggcacttcagggtaggcctgctccaggtactcggtgatcgccgaggactccgacaaggcgaagtcgccttccaccagggtcggcacgcgctgggtcagggacagttgggcaaagtcggcggcgtgctgttgcgcggcatccaggtccagggcgatcgtgtcgaacgctaggcctttttcgcgcagggtcacgaacaccgacatggcgtaggggctggtgtacagatgatccacatacaggcgcataacgattctccttgaggggaacaccacgctacgagatgcgccacaagaaagacaatgcgctgtttttatgggggcattcctgggtggaataccgggctaaccggcaaatccgccctcgtccagaaaggcacgttcttcatccgtggtctcacgcgccaacacctcgtttcgatgaggaaaacgcccgaattgctcgatgatgcgcgcgtgttccttggcccaatggtaggtgttggcgtccagttgccggttcaggtccaaggagcgctgttgatcggccgggtcttccgaatgttcgaatggcagatagcagaacgcacgcaatgccggttcgacctgccggtccagcccggcgtccaccatgcgccgggcatacagccgtgcgagcgggtcggtggcgaacatatgggcggtgccgcggaaggcattgcgcgggtactggtcgagcaggatcagcagcgccagggcgccatgcgccgagtccagccagctttccagctcacgccgggccgcttgcaggtgggcggtgtggaaggtgtcgcggaagctggcgtcgaaggcagcgtccttggcaaaccagcgtttggggccggcgtgttgccagaagtcgatgacagcctgcgcagtggtcatggtgagtacctggaaagataatttagctgacggcatcagaatccaatgttataggataacacccccttgccgccctgccctgtgatcacgcccatgaccgatgctgttcccctgcgccaacgcctgctctccatcgacgccctacgcggcctggtgatcctgttcatgctgctcgaccacgtgcgcgaaaccttcctgctgcaccgccaggtcagcgacccgatgaccatcgacagcaccgagcccgcactgtttttcagccgcaccctcgcccatctgtgtgcgccggtgttcgtgttgctcaccggattgtcggcctggctctacggccagaagtaccagggccgccgcgatgtctcggcgttcctgttcaagcgcgggctgttcctggtggtgctggaattcaccctggtcaacttcgcctggaccttccagttgccgcccagcgtgatctacctgcaggtgatctgggcgattggcgtgagcatgctcgccctggcggcgctggtgtggttgccgcgagcgctgctgatcgtgttggcgctgctgatcattggcgggcataacctgctggacggggtgcacttcgatacggggtcggccttgcatattccgtggacgatcctgcatgagcgcagctggatcgaggtgggcgattcgctgcggttgcgcacgacctacccggtgctgccgtggatcggcgtgattgcattggggtacagcctgggcccatggtttgccaatggcatgccgccggcgttgcgccagcgttatctgttgctgggtggtgtgggtgcgttggtggggttcgtgctgttgcgcaccgccaatggctacggcgagaagccttggcaggcctatgagagcggcgtgcagacgctgatgagctttttcaacatcaccaaatacccgccttcgctgctgtttctggcgctgaccctgggccttggcttgctgctgttactggcgtttgaacgcgcggggcaaaaacgctggatcgccatcctggccaccttcggcgcggcgccgatgttcttttatttgctgcacctgtacgtgctgaaaatcctctacgtcgcctgtgtggcgttgttcggcctcaaccacggcaactacttcggtttcgacagcatcggcgccgtatggctggtggcgctgttgttgccactggcgctttacccgcctgtgcgctggttcgccgggctcaaggcgcgtcgccgcgacctggcctggctcaaatacctctgatccctgacgctcctacagcgggtggtgtcaggccgatgcagccatcgtcggcagacggtaatagggagacaaactcattttacttctgatggtcgcaaggtccgctcatgctgcgaccagatgcacatagaacgcgtgaaacatgaaatatgcacacaccgcgagagccaaacccatgcaccggttgaacagggtgaacgccgacgccccattgatcctccgccccagcagcgcccccaacaacgcgtagatccacggcgcgcaaaacgccccgaaggccagcgccgccgagaccacggcgatggacgcgtagaggaagatgtccatggaagacctgtagtagaggaagtgaggcgagtctactgagcggggttggggggattcttgtacgtttgtggtagggcaggatttggcgatgctgggcatcccagcgggagcaagctccctcgccacgggtatagtgtttgtcgaactctttgggataaaaccagacatggatgcaatcaatcaaggcagttgcctctgcggtgcagtcacttatcaagtcgcgacaccgctcaaggccgccacccactgccactgcaaaaaatgccagaaagtgcatggggcagcctttgccacttacgccagcgcgcctcgatcagacgtgactatccaagctgtgcgggacacgttgaaaagttatgagtcatcaccgggcattactcgccagttctgttcggaatgcggttcatcgttgttctggcacgatgcaaaagggctttatcccgattggatttcgattgcactgggcacactcgataccccgttcgcgcctcaggacctgaagcaaagctgcatcgagtccagggtcgcctggctgtaggagcgagcttgctcgctcctacagttgctacccgcgtttacggacctacatcaacggaatcgagtagttcacaaacacccgattctgatcctggtcccgcgccacttcactgcgcgacacaccgttgcgccagccgaacccgacgttcttgaacgtgccgctctgcaccacgtaatccagcgagatatcgcgctcccactcgctcgcatcgttgccgctggcagtgaggatatgctcgcccttcaagtacatcaccgacgccttcaggcccggcacgccaagcgaggcgaagtcataggcgtattgggcaaaggctgtgcgttcaccggcctggatgaaggtctgcacggtacggtcggtgtagaggtacaggctggaaccgccctcccctttgttgaccaggccgccctggttgagttgggcgaagttgctgtcgtccgagacttgctggtaaccggcggtgatcgcgtgcgggcccagggagtagatgaacgccgcgctccaggtgttgttgtcgatttcacccgtgccgttcttggtatagccgccgagcttgtaaccttcggcacggccggcgacgctgctgttcttgccgtcggaggtggtcttgaagtagcgcaggtcggttttcaatgagccgtagtcgcccagcggcaatacatggatcagaccggcaaagtgctgctggtaatagtcttcgaggttggcgtagtagtactggaccaacaggtccttggttacctggtagtcggcaccggcgtagttgaatttattgctttcctgggtgccgcccgccgccgccaggccgctgcgatcactggagccacgaccagtggtgtgctgcagttggccaccgaccagggtcaggttgtcgatgtccttgctggtgatctgcccgccttcgaacgactgcggcaacaagcgcccgtcgttgctcaccaggatcggcaggttcgggcgcaggtagccgtagcgcagttcgctcttggcaaaacgcgccttggccgtcgcaccgccacgggcccaggtgtcggcggccttgccgtcgtcggtggggatcatcgaactgcccacatggcggccggcgccgctgtcgagggtgacgccgagcatgcccacggcatccaggccgaagccgaccgtgccgtcggtaaaccccgactggtagttgaggataaacgcctggccccactcttcggtcttcgacggtgcggcggcgccgtcacggttgtcgttgttgaagtagaagttgcgcaggctcaagttggctttactgtcactcaaaaaatcagccgaggccagggggctcagggcaatgcccaggccgccggtcaatacgcttaacacatgcaaagtggctttcatcacaacctcagtcaattaatccatgggcgtcataaaacggatacggccccgggtattccccgaacacgccgttgtggctgatcaaaccctgctgcgcctcccagcgatgcaacagatagcccgccggctccaggttgaaatgcgcgggcgccgcttcttgtaaatccagcacgatctgatgggaggtgccggggcatacacaactcaggctgccgccgaaacgccgctgcatcggccggtgcagatgaccgcagagcaggcgctccacttgcggatggcgcgcaacgacgtgctccagggcggcagcattgatgaagggttcgcggtccatgtggccgatgccgctgatgaacggcgggtgatgcaggatcagcagcgtcggcgcatccgggcgcagggccaattgctcatccagccagtgcaattggctatcgagcaattggccgccgtgagcgccgggaatggtcgagtcgaggccgatcaggcgcagcggatggtggtcgaccacccagtccaacgggccatcggccgacaacggcagatacgcgtgatcgcggaacgcttccagcaacggcccacggttgtcgtggttgccgggcaccaggtagcacggcatgtgcagccgggcgagttcggggtgcaacacggcgtattcatcggcacggccaaagtccaccaggtcaccgctgatgaccacgatgtcgggccgtgggtgactggcgttcaagtggtcgacggcacggcgcagcgcgcctaacgtgtcgacaaccccgtaagtgaggcgctggccggctttaaggtgcaggtcgctgatctgcgcgacgagaaacggacgattcacgatagagtctcaagcattcagggtgaacaacatgtgcggcgcaattgccagggcaatcggcgcgccgacggcgtacagctggttatcgctgctgtcgaccagcagcggttgcgggccgcccacatccaccagcaggcggctttgcgcgccttggaagaactgcgccagcaggtggccgtgcaagtgcccttcgctctccatcaccttcaggtgttcggggcggcaatacaccgtgctgggcacgtgggcgtcatgccacggcaactcgccgccacagactttcaagccatgggccgctggctcgagcacggcaaaggcattgaggttgccgacaaagcccgcaacgaaggcattggccggtttctggtagatgtcacgcgggctggccaactgcgcgacacgcccgtgttccatcaccaggatgcggtcgcccagggccatggcttcgccctggtcgtgggtgacgaacaccgaggtgatgcccaggcctcgcagcagctcgttcagctcgctgcgcaggcgttcgcgcagttgcgcatcgagggcggccagcggttcgtccagcagcaacactttcgggcgcggcgccaaggcacgggcaagggccacgcgctgtcgctggccgccggaaagttcgtggatgctgcgctggccgtggtgctgcaagcccaccagttccagcaattcttcgcagcgcttgttgcgctccaccaccgccataccgcgaatcttcaagccataaacgatgttcccggccacatccaggttgggaaacagtgcgtagttctggaacaccatgcctacgtcgcggcgttcgataggaagacgggtcacgtcctggtcgccgaaccacacctggcctacatccgggcgttcgaggccggcgatcaggcgcaaggtggtggtcttgccgcaaccggacgggccaagaatggccagggtttcgccgccttcgacggtcaggtccaggtcatgcacggccacggtgccgtcggcgaatgccttgcgacagccttgcaagcggatagtgatagcggtcatcgacgctctccacgggacaaacgggcactgatggcctgcagcgctatcagcagcggcacgatcatcagcaaaaagataagggtgtaggcgctggcgatttccaggcgcgccgaggcgtagctgtcagccaggcccacgggcaaggtcttggtcatcggcgtgtgaagcatccaggtcaggttgaattcacccagggacaaggtcaccaccatcaacacgcctgccaggatcccggcccggcagttgggcaccaccacgctgaaaaagcgcttgatcgggccggcacccaggctggccgccgcttcctccagtaccggcaactgctggcgctgcatcaccgccatcaccgggcgtaccaggaacggcaaggtgaacagcacatggccgaccagaatgaacagccaactgctgcgaaaggtgccgaactggccgtaggtcagcagcaaggccaacgcactggccaaccccggcatggccaccggcagcaccatcaactcttcgaaggcgcggctgaagcggttgttcatgcgcaccaagccgtaggccgccggcacacctatcacgcagacgcacactgcgcaggccagcgccagttgcagcgacagccacacggtgggcgaatacgcctgccacacctgcaccagccaatcgaaggtcaagccactggacagcccgacgaagaaattgcgggtcaacccggccagcagcgacatcagcactggcaccagcatgaaggcgcacaccaacagggtgaacagcagttgcagcacaaacagcgatgagcgcttcacagcacactccccgaatttttcaccaggcggcgcgtgagcagcagcacggcccaggtcaccgcgcctagcaccaccgacaatgcggccgccacggcgaagttggcgtagttggtgaacacgttgtagatcgccaccggggtgacgttcagccgcgtgcccaaggtaaaggcggtgccgaacgcgcccatggaggtggcgaaacagatcgccccgcaggaggccagcgccggcgccaggcccggcacgatcacatcgcacaccacccgccaatgcccggcacccagggagtgcgcggcctcttccaggctgcggtcgaggctctcgcatgcggccatcaccgtgaggatcacccgcgggatcgagaagtacaggtaacccacgaacagccccgccagcgagtaggcaaagatccagcgttcaccggccaattgcaggcccagcgcggcaaacaagccctggcgcccggccaacaagatcaccaagaagccaacgaccacgccgggaaacgccagcggaaacgtgagcaacgccaccagcgccgagcgcccgaaaaactgctgccgggcgagaaacacgccgctgataccgccgatcaacagcgccaccagcgtcaccaccacggccaggaccaacgtttgccccaggctgcccaagtactgcgcgctgctgagcacctgccagtagccgctgccatggctgtcgcggctatcggcgccgagcgccatcaggtgcgccagcggcagcagccagaacgcgagcagcaccgcaaaggccggggccagcgcccaggctgcgtgtcttgccgatgctgccacttacttgacctcgttcaggtatcgggcggcgaaggcttcctgcacagcggccattttttcgtagtccaccacgccggcacgggcgtagtcgctgtcgggcaggaactgtgcggccacctcagctggcatcttcatcggccgtaccgggcgcagataggccttggcccagagcgcctggccttcgtccgacagcacgaagtcgaggaccttttctgcgttggcgcggtgcggcgcgttggccaccaggctcatcacgtagggcacgctgatgctgccttcctgggggatcacgaaagcgacgttggccttgtctttgtagcgggcgcgataggcgttgaagtcgtagtccaccaggattggcaactcgcccgacagcacccgcgcataagcggtctgtttgggcacgatgggcgcgtttttcgccagcttctggaagtagtcgatggccggcgcgaagttgtccaggtcgccgcccatggcgcggttgatcgccaccgccgagacgtacccgacaaacgcgctggacgggtcgaggtaaccgaccatgcctttgtattcaggcttgagcaggtcggcccagctttgcggcaccggcagaccgccgagtgcatcgacgttgaccatgatgcccaaggtgccggagtgaatcgcgaaccaatggccggccgggtctttcagcccggcgggaatctgctcccaggccttgggtttgtaggtgtcgaccacctcggccttttgcgcctgcaggccgaaggtcacgccgtagtaaacgacgtcggccaccggtgcggctttctctgccaccaactgtgccagggattggccggagttcttgttgtccagcggcacttgcacacctgtgctggcggcgatggccttgagctgggtgccccagtcggcccagtccggcgggcagttgtagcagatcgcggtttcggcggcctgggccaggctggccgaaccgcacagcagcacggctgccagggttttacggagtgcgcgcatcaggggtttcctcgtggggttgagtgctttcgcccggccggatatggcaaggcaggcagtgagacgtcggggcattgccggcgatctgcgccagcagttggtcaatcacagtgctggcgagcagcgcgatgggctgcaccacgctgcacagggtcgggtgcatctgggtgccaaggctgatgccatcgaagcccatcaccgagagttgcccgggcacgttccaggcgttgcgacgcagttcggcgatcaggctgatcgccaggaagtcgttggaacacaccagtgcggagggtgcctcagggccttgcagacaaggttcgatggcggcgaattcggcctgggtatgggctggcatttcgatcactgtgcggggctcgaggccgtattcgcgcatcgcatcgcaatagccggcgtagcgcaggcgcgcacggtccgactgcagcgcggggccggcgaccatactgatgcggcggtgcccggcttccagcaggtagcgcgtggccagggccatgccggcgcggttgtccaccgacacggcgctgtagttggggttgctgggttggtggtaggccaacacaaacggggttttctcagtattcaggctgctgagcaccacgttgctttcagcatcggtgaccgtcagcaccaggccgtccacgcgctggcgcaacagctcttccaccacaatgctttcgcgctcgctgctgtagtcggtagtcgccagcaacaggctataaccacgtaaccgtgccgcgcgctccatggcctggaactgttcggcgaacaccgggttgagcaggttgggcaccaccacgccgatcaactgggtggtttgcaggcgcaattggcggcccagcagattgggccggaagcccaactcgcgggcggcggcgaacacctgctcacgggtggtcgggcgcacctggtcgggggaggcaaaagtgcgggcggcggtggcgcgggataccccggccaaccgtgctacgtctttcaagtcagtcattgtcactcgcttgagatcgatctcattggcgaggacagtaatggggaaatgtggcagttcggcggtaaggtgatgacagtttgatgtcgatgaacccgatagacaggggccaaactgtgggagggggattgcccccgatggcagtgggtcagtactggattgggtggctgacacactgctatcgggggcaagccccctcccacattggaccggtgcccatccatagatggtcatactcggagggtagggtcacaaaccgggcgcgcaaaatccgcccactaacctttcgattcgatccaagtgcgggcacaatgcgtgtccttttttggcaggcaccgccgcaggctctcaaaaatgatcaaaacgccgtactacctcatcgataaacagaaacttctggtcaacatgcagaagattgcttacgtgcgcgaacagtccggcgccaaggccctgctggcgctcaagtgctttgccacctggtcggtgttcgacctgatgcagcaatacatggacggcaccacctcgtcgtcgctgtacgagttgaagctcggccgccagaagttcgaaggtgaggcgcacgcctacagcgtggcctgggccgacgatgaaatcgaagagatgctggataactgcgacaagatcatcttcaactccatcagccagctgcagcgttttgccgaacgttccgagggcaagacccgcggcctgcgcgtcaacccacaggtgagcagctccgactacctgctggccgatccggcgcgtccgttcagtcgcctgggcgaatgggacccggtgaagatcgaaggcgtgatcgagcagatctccggcttcatgttccacaacaactgcgaaaacggcgacttcagcctgttcgacaagatgctcggcgtcatcgaagaacgcttcggcgcgctgctgcacaaggttgagtgggtcagcctcggcggcggcatccacttcaccggtgaagactatgccgtggacgcgttctgcgcgcgcctgaaggcgttctccgagaagtacggcgtgcaggtctacctggaacccggcgaagcggcgatcaccaacagcgcctcgttggaagtgaccgtgctcgacaccctctacaacggcaagcacctcgccgtggtcgacagctccatcgaagcccacctgctggacctgctgatctaccgcctcaacgccaagctggcgccgagcgacggtgaacacacctacatggtgtgcggcaaatcctgcctggccggggacatcttcggcgagtatcaatttgatcgtccgctggccatcggcgatcggctgtcgttcatcgacaccgcaggctacaccatggtcaagaaaaactggttcaacggcctgaaaatgccgtccatcgtagtgaaacaactcgacggtactgtcgaggtggttcgtgaatttggttacgacgactacctgtccagcctttcgtaagctggcggataaaggagagataaagcaattgaaaaagaacgttcttatcattggtgcaggaggtgtcgccaaggtggtggcccacaagtgcgcgcagcacaacgacgaactcggtcgtattgctatcgcgtcgcgcaacatctccaaatgccaggccatcatcgacagcgtcaaggccaagggtagtctcaaggtgcccgccgatatccaagccttcgcgctgaacgccctggacgtggaagcgaccaaggccctgatccgcgagacccaatcgcagatcgtcatcaacgtcggttccgcgttcctcaacatgtcggttttgcgggcctgcatcgacaccggcgttgcgtacctcgacaccgccatccacgaagagccgggcaaggtctgcgagaccccgccgtggtacggcaactacgaatggaaccacctggaagagtgcaaacagaagaacatcacggccatccttggcgtgggcttcgacccgggtgtcgtcaacgcgtatgccgcgctggcgcagcaacagcatttcgaccgcattgattcgatcgacattctcgacgtcaatgccggctcccatggcaaatatttcgccaccaacttcgacccggaaatcaacttccgcgagttcaccggacaggtgtggagctggcagaacagccagtggaccagcaacaccatgttcgaagtcaaacgcaccgatgacctgccggttgtcggttcgcagaacctctacctcaccggtcacgatgaagtgcactcgctgtcgaaaaacctcgacgtgcccaacgtgcgtttctggatgagcttcggcgaacactacatcaacgtgttcaccgtgctgaaaaacctcggcctgctctccgaaaaaccggtcaccaccgccgaaggcctggaagtcgtgccgctgaaactggtcaaggccgtactgcccgacccgtcttcgctggcaccgggctacaccggcaagacctgcatcggtgacctggtcaagggcaccaagaacggccagccccacgagatgttcatctacaacgtggcgtgccatgaagaagcctttgccgagaccgacagccagggcatctcctacaccgcaggcgtgccaccagtggccgcagcgctgctggtggcccgtggcgagtgggatgtgaagcacatggccaacgtcgaggaactgccggccgaaccgttcctgaaagcgctggatgtgatggggttgccgactcgaattaaagacgagaacggtgatcgggcttgggatgcgattgcctgataggcgatagcggcccgaacaaaaaaatgcgccctctggggcgcattttttgtttggggcaaacacagccctcacgaccaatgaggtcaactgtgggagggggcttgcccccgatggcggtgtgtcagtcaacacatatatcagcagacacactgctatcgggagcccccccctcccacagttgaatttccagagtctgttattccagattccgagcctaattgctcagtggccttgaacactgcaaaagcgccgttacaccgtgcatgacctactgcccccaaacacttaatttggagtgacgccctgtggtggtagtaaccaatgccgtgtagtggtccaccccaaaaagaccctcgcaccgtcggcggtctgaccttgctgagacaacacttcgcctgccgcagccttgcgcaaaccgatcatcactggcagaaacctttcgcggaaagcctgtggttgcttagcgaaacaagcctcgatcgacttcaaggcctctttgcattcatgctcctcaagcattgcgaggtaaaacaccatctggcgccaggcataagctgtgttcttgagcataatcaatcgagcatgatagagaccggtgtgcatctgctgccgtttgcagacccactcaaaactcgcctgggccatgccccctagccgagtactcagcaaacctttcaacccgagctcgtcgaaaatcagcgcaaggttttgcgtcgttaaaatctgctgttgctcaaggatcgtgccattggttgcagggtgccaagtgcccagctctgccccagcccgctttgcgcataaggcagcaaaagcctcacttgcacctcgcgcacgccgtcgccctcttgtgacgaagccggccagttcgtcggtatcgatagagtagtaacgtgcataaagggagcctgcgattacccgactcgctcgccgagcagtgtcagcgaacttggttgagaactgccccatgaagatatctgcagcgacctcctccacaaagggaaggtccagctccgcagtgtccaccagcgttccaaattcctggagaagcttgttaggaaggatggcgtaggggaacgcatgaagcgtcaatgccgaagactcaacgagagcctggctcgctgcacccgctgccccggtacctgactgtcgatcaccctcaatggctgcaatccaaggcaactcactgaagcccacctgacgttgaagattcaatagcaacaacgaacgcctaaggcggaaagcctgataggtggaggcatagaccttcctcaacgcttcgtcgtgcagccctgcgctactcagctgtgcggtcatcgcgggcagtactcgtgcgactgtgtcacccgaagtaatcagcccatgctcaatcaactccctgattgttccgctgcgacagcgttgaacacgtcgcagaattggcgcgggtatcgcgacaccttcgcccagtgcgcaatccaccgcctcttgaacatcaagcggcttggccaaatcggcaaaatcaaagatgccactgtgtgcggggtacttagagaggcgctttgcgacggcacgcgcgatcagatgatgctctggtcctgatacctggcgaagctggtcctcccggaacgcgaggtgagagccggaagccggcgcaccatgtttgcgcacaaagtcatcgactattcgccgtatgcgacccacctgacgccctgtaagcgactctgcatcgcgagagcattgctctagcaacagaaacaattccgctacacgatcaggagagcgtttgttgatcccgagttgttcataacgcatagccaattcggctgcctgttcgtgccactttgccgggaagatacggcatggccagcccacctggtacgtcaggaggaaatgcgcgacggctgaatcataaagaggtagacgggcttcgatcgcctgtttctgagcaacgatttgagcccgcggtggcaaggttgaaagtaactgcttgacctcacctgcattggcgatgtggacctgcgtagctgataccggtagctgtgcggacgttgccggaaagaaacgcaatcggtcgaaaaacggaacaatcacgtctagcagtgccctggcctcgtcgttgcgacgctggctcgacagccatgccacggtcagtaacgcggcttcttccggaacatcaacgcgatagtcacaacgggtcagacgctgttgcagatgttcaaggccttcgtccgtcagatgccaagcgttgagatccagtcgctcaaaccctctgcgaatgccggaaatagaagcgaccaattcacgctcatagtcagttaactcgccacccgccaacaggttgccggtcgcaaagccgcctgtaatgacttccagcgtcacccagacaggtatctcggcaagcggggttcgcgagccatactcggcggtgccttgcagcatgtgcgcaatcacttgttgccactgtgagatacgtctgtgggcattgaatcgggcgagagggccacgggtttgatcgtgtgcaatcaatgccttggaaagttggaagaccgcataacccgcgtccatgccagtcactccgtttgctctggagaggtatccagattgccttttaatgtgatgggtccggaggctggattcgaaccagcgcccacccggttaagagccgagtgttctaccgctgaactactccggaacaggggcgcattgtcgggcaaccgctaaggaatgtgaaggtcacagatggtcattaagcaatggctgacgacactgctctttttttgtcagaaccagcgggaattattcaagtagcggcgtgccagcagatgtattcggtactgttacaccgttgctgagataaacacagccctcacgaccgatgaggtcaactgtagttggcttgccggcgatgtcggtgtgtcatttgtgcatttgttactgacgtatcgctattgccggcaagccggctctacagttgatttgcagcggatgttggagtggagttattcgaggttacgggctgagttactcagcgctctcgaacactgcaacaacgccggcgccaactgcttctccgcatccgccctactccaccgactggtcggcgccaccacatgcaccgccgccaccggtcgaccattggcacccagcaccggcgcaccgatggtcatatcgcccaggaacagctcttggccgttcactgcatagccctgttcgcgtacctgttgcaacgacgccatgatttcgtcgacttcagtcagcgtctggctggtgtgggcaatacgctgactgttctcgatcaacaccagcgcttcctcctgcggcaacgcgctcagataggcgcgtcccgacgccgtgcaatacatcggcacccgcgagccgatcggcatgtgcacgggtacgaagcccgagctgacgaaccgtgcgatgtaggtcatgtcgtagccggctggctcggtgaggcacgaggtctcgccggtcagccgggtcaactccgacaggaacggattcgccacctcaatcaacgaatgcgcatccaggtaactgaagcccagctccagcacccggggtgtgagttggtaatgccgggtgcgggagtgtttccgaaggtaacccaggctttcgagggtaaacaccatgcgctgggccgagcttttggtcatgccggcggcctcggccacctctgcaaggctcatgctgcggcgctgtgcgctgaatgccttgagcaccgacaggcctttttccagggattggttgtgcagactgttgcgttcttcggacatggcggactcacggtcaggtcgatcaggcgtggcgatatttttaacccaaatcacagaaatagaccattaaatatcgcatatcgatacgaatggttcattttttctattttccatagcgctatacgatttttattgatcgaaatggcacagagcttgcgatttcatcggcagccgcttgcggtactgactttccgttttccttctggagtaacccgatgaacagtctttcgcccttgtttcgccgccttgccttcggtctctgtgccacgttctgcgtcagcgttgtgcacgccgagagtgcgtcctcgtacaaagtcggtgcaacagccagtggttcgccgtttacctttctcgacatcaagagcaacagcatccagggcgtgatggtcgacgtggccgaggcggtgggcaaggccggcggctttaccagccagattgagcagaccaacttcgccgcgctgatcccctccctcacttccggcaagttggattttatttccgccggcatgctcaagaccgaagaacgcaccaaggtcgttgacttcagcgctccggtgtatgcctacggtgaaggcctgatcatcaacgccgacgacaacaccgcctaccctgacctcatgcctctcaaggaccaagtggtcggcgtgcaggccggcactgtcttctatgaccagttgaacaagctcggcatcttcaaggagatccgcacctacgactccatcggcgagatggtccgcgacctgtccctgggccgtatcaaggccgccgtgggtgaccagccggtggtggcctaccagatccgccagaagctgttcaaaggcgtgaaactggcgccggactacaagcccactaatgtcggtgaagtgtgcctggtggtgcgcaagggtgacgcgcaaaccctggagcgcctgaacaccgcgatcgccagtatcaaggcggacggcaccctcgacaacatcctcaagaagtggggcctggatacccaggtgcgcccatgaacccggcggagttcctgcaaaacgcccaggacttcttgccgatcctgctgcaaggcgcgtgggtgacgattcagatcaccgtgctgtcattcctgctcagcagcgcgatcggcctggtgctggcgttgctcaagctgtcgccgatccgtgcactgtcgtgggcggcgagcaccatcatcaacgtgatccgtgggctgccgatcatcgtgcagttgttctacatctacttcgtgctaccggacatgggcgtgcacctcaccgcgttctatgcgggcgtgatcggcatgggcatcgcctactcggcgtaccaggccgagaacttccgcaccggcatcattgccgtcgaacagggccagcgcgaagccgccgaagcactgggcatgcgctcggcgctgatgatgcgccgggtgatcctgccgcaagcctttcgcatcgccttgccgccgtatggcaacacgctggtgatgatgctcaaggactcctccttggtgtccaccatcaccgtcgcggagatgacccgccagggccaactgattgcctcgtcgaccttccagaacatgaccgtctacaccctggtcgccctgctctacctgctgatgagcctgccgctggtgtatggcctgcgccgcatggaacagcacctgggccggaggaaaaaagcatgatcgagatacgccaactgcaaaaacactacggcagccaccgcgtgctgcacggcgtcgacctggacgtggccaagggcgaagtggtgtgcctgatcggcccctcgggctcgggaaaatccaccttgctgcgctgcatcaacgcgctggaagcctacgacggcggccacatcaacgtgttcggcgaaaccgtgcagcgcggcagcaagaccgtgcacgccctgcgcagccgcatgggcatggtgttccagcgcttcaacctgttcccccatcgcaccgtgctggaaaacgtgatggaaggcccggtgtacgtcaaaggcgaaccgcccaagcaggcccgtgaagaagccctggtattgctggaaaaggtcggcctgagcgccaaggccgacgcctacccggagcagctctccggcggccagcaacaacgcgtggccatcgcccgcgccctggcaatgaaacctgaagccatgttgttcgatgaacccacctcggccctcgaccctgaactggtcggtgatgtgctggcggtgatgcgcaccctggccgatgagggcatgaccatgatcgtggtcactcacgaaatgggctttgcccgcgaagtggccgaccgcgtgtgcttcctgcatggcggctacatcgtcgaaagcgggccggccgaacaggtgctgggcaacccgcagcatgcgcggacccaggacttcctgcggcgcgtgctgcaccccaccggtaacacgcggagcctgtcatgaagtctttgtggtcagccacggctccatctgtggtgccgacgcctgcattgggcgagtcagtgacggtggacgtggcgattgtcggcgcgggatataccggcttgtcgacggcgctgcatttggccgagcgcggcgtcagcgtgtgcgtactggaggccaacgagccgggctggggtgcgtccggacgcaacggcgggcaggtcaacccgacgctcaaatacgacccgcagcaactggtgcagatctacggaccggagcgcgccgagccattgatctcgaccgtatcgagttcagccgacctggtgttcagtctgatcgaaaggcatggcatcgattgcgcgccggtacgcaaaggctggatgcaagtgtcgtacagcgaaaaaggcgtcgccgggttgcacgcacgggcagatcaatgggccaggcgcggtgtaccggtgcagcggctggatgccgcagcggtggcttcgcgcatgggcagtgaggcgtttgccggtggctggctggacggtcgcgccggggcgattcagccgttggcgtatgcccgtggcttggtgggtgcggcgttggcggcgggtgtgcggatccatgggcagagcgcggtgaccgggttgcagcgccagggttgcggctggcaattgcagacggctggcggtgcgcaggtcacggccgatcaagtggtgttggccaccaacggctacagcggcaacctgtggccgggcatggcgcagagcatcctggcggcgaacagttttatcgtcgccaccaaacccttgagcgggcgcgcagcggacagcatcttgccggggcaggaaaccgtctccaccgcacaacggctgctgctgtactttcgcaaagacagccatggccgcttgctgatgggcggacgcgggctgttcaacgaccccacgtcacccacggatttcgcccacctggaacgctcgctggcgctgctgtttccgcaattggggccactggaattcgagtatcgctgggcgggccgtattgcgatcacgcgggacttcatgccccatgtgcaccagcccgcaccggggcttacattggcgctgggttgtaatggccgtggcatcgcgctgtgtaccagcctggggcagcaattggcggggcggttgtgcgacagcacggcggatttcgcctacccggtgacgccgttgcagcgcttgccgatgcatgggttgcagcggttttacattggcgcgggggtggcgtggtacagcttgctggatcggctcaatgtgagctgaacagagccctcactcacaccactccccatgtgagagtgggcttgcccgcgacagcggtgtgtcagccgctggatgtgctggctgatgtaccgccatcgcaggcaagccagctcccacactggatctccttttccgggagaacctattgcacacgtaaagcgattaatactctcaatcgccaacggcgatcgctcccatgaacggggcgcaccctcaaaacaccgaccacccaatccgctcactcaacaattccaacgccttcatccccgccagcgagttccccgccgcattcagctccggcgaccacacgcacaccgtaaactgccccggcaccaccgcgacaatcccgccccctaccccgctcttgcccggcaagcccacgcgataggcaaaattgcctgcctcgtcgtacagcccgctggtggccatgatcgagttgacctgcttggtctggcgcgccgtcaaaatctgttcgctgctgtgggcgctcacgccttcgttggccaggaagctgaacgccctggccaagtccaggcagctcatctgcaaggcgcagtagttgaaatagctgtgcagcaccgcgtccacgtcgttgtggaagttgccaaaggatttcatcaggtaggccatggccgcgttgcgggcaccgtgctgggcctcggattcggcgacgacgctgttgaccaggatctgcgggttgcccgacaggcgccggacgaaatcgcgcatcgacaagatcggcacggcgaagcgcgattggttgatgtcgcagatcaccagcgcaccggcgttgatgaacggattacgcgggcggccacgttcgaattccagctgcaccatggagttgaacggctgcccggaaggctcgtgccccaggcgctcccagatggtttcgccaccgtggtcgatggcctgcaccaggctgaacaccttggaaatgctctgcaccgagaacagcgtgtcggcgtcaccggcgcagtaggccgagccgtcgttgccgtacacggcgatgcccaattggttggcaggcacatcggccaatgccgggatgtaatcggcgactttgccgaggccgatcagggggcgcacttcgtcgaggatcgactccagcagcgcctgcatgtcttgtccagtcatctgtctttgaatcggtggtaagcggggcgcggaggatacctgaaacacgcaggtcaagcttcatcagggccgcttcgcaccccaacacgggacaagcccgctcgccacagagggagtggggactccctcgccacagctcgatgttgcgtgcgctcaaaagtgcgccacatccgacacccgctcatccagcacatcccgcgccagcgcccaggcccggtccctggactccaccaccagcagcggatagccccaggccttgccgaacatcgcggcaaacggcttgagtgccaggcgctgcgcggcactgggttccacctggatcatgcctttgacataggtgcgcagcgcctgcttgtttttcttcatccagatcgacgcttgcttgcgctcctcatgggagtgttcgtgattgttctcgtccacggatttttcgtgcagcagcaggaagggttgctggcgggccagcaggctttcgaacacggcgaaggcatcctccggcccgccttcattgggcgcatcaaagacgattttcaccaccgggaatgttgaactgtcgagtcgcatggccgagctccttgttgagaattgatctcactataagggccagaccactggacggcattgcacagaatagccagactgtttcgcaattcagccaacctgcgatcccttgtcatgaaacaccatcgcctggaaatgcacgatccgtcactgtccagagacgccgacgtattcccccgcgccgtagtggccgtaggggccaccgccacgtcggatacctgggaacatacccagcatgcccatcgcaaaggccaactgatgtacaccttgcgcggggtcatccattgcgagattgaggccggtatctggatcgtgccgccgcaatgcgcgctgtggattcccggcggcacgccccacgcggcacggggggctggcgctgcggaagtctattgcctgttgatcgaccccgatgccgcctgcgccctgccccggcaatgctgcacgctggcggtgtcggccctgttgcatgagctgatcagcaaggcggtgagtttcccgcaactgtatgacgagcacggcgcccagggccgtttgatcagtaccttgctggatgaattggccgtcgcgcctgttgaagccctgcacctgcccatgccacaagatccgcgcctgcgtcgcctggccgacagcctgctggctgaaccggcggacaagtccaccctcggtcaatgggcggtgcgcatcggcatgagcgaacgcagcatgacgcgcctgctgctggaggaactgggcctgagttttggccgttggcgtcggcagttgcatgtgatcctgtcgctgcaacgcctggccaggggtgagagtgtgcagcgcgtggccctggacctgggctatgagaacgccagtggttttatcaccatgttccgcaagaccgtgggccagccgccggcgcgttatctggcggaccgcgccggggccttgcactcgctggcgccggcgacgattgcgctgaactgaaggtattgcctacccggatctgcgggcctgctcgccacacagtcaactgtccagatcagccaagcccaaatgctcacgcaacgtcgccccttcatacgcggtgcggaacagccccttgcgctgcaaatgcggaatcacgctctcgacaaactccgagaacgagcccggcaaataccccggagagatcacaaacccgtcgcaaccgccctgctcgaacaactcggccagttgatcggcaatctgcgcgccggtacccaccaattgcggcacacgtacgctgctggcgaagatgcgtccgagttgctccaaggtggtttgcgggccttgcatcaacagcttttcagccgccgccgggtggatcagcggcgactgggcgatctcggccagcgtcgccgagagcgggaatggcgaaagatccacattcaactgcgaagccaacgtcaccagccccaattccggacgggccaatgcattgtgctggtcgcgcttggcacgggcctcagcctcgctgccgccaatgaacggcatcaccgccgtgagcactttgcaactgtcggcgtcacgcccctgctgcaccacctgggcacgcacgtcatcgcgaaacgcacgcatggccaccaagtgcgggtgaatggtgaaaatcgcctcggcccaacgcgcaccaaagcgccggccacgcccggaagaaccggcctggatcagcaccggtcggccctggggcgtgcgcgggatattcagcgggccttcaaccctgaaccattcgccctggtgctgcaccgaacggatcaatccagggtccgccagtacgccgctttcgcggtccagtttcagcgcgtcctggccccagctgttccacagtttcaacgcgacttcgacaaactcatcggcgcggtcatagcgcaggtcgtgctccaggtgcttgtccttgccgaacaggcgcccttcgctgtcgttcatcgaggtgacgatattccacgccgcacggcccttggacaggtggtcgagggtggcaaattcacgggcgatgtgcgccggttcgtaataggtggtggaccgcgttgcacccaggcccagcttgctggtcttgccgaccaggtaagagaggatcggcaacgggtccaggcgcgtggcgtcctgggcgccgtagcgcaaggcgaactcgcgggagccgcccatctggtcgcccacggccaggcggtcggcgaagaacaggaagtcgaacaacccctcctccaccaccttggccacccgtgcgtagtactcagggtcgaggtaattgccaacggtttccgggtggcgccataccgcatggctgtgcacgaccggcccactcagcaggaacgcggataaatggatctggcggctcatggcttgggcgtccacacgttgatgtcgttgatcttcaacgccctggggatcagcttggcggcgtagtaggtgtcggcgatgcgctgttgctcggcgaggtggtccagcttgaccgggatgatgtcgtagctgcggcggctattggcgcgctccaccgtggccggggggatattgccccacagcgggccaaggatggcggcggcttccttgggatgggcctttacccattggccggtctcgcgcagggtgtcgaaggtcacctgcaacacgtccgggtgggccttggcgaactttgtcgtcgccaggtagaaacggttgtagtcggccaggccgttcttgccgtcggcgatcacccgtacatggtgatccagctgttgggtggcgaggaacgggtcccagattacccacgcgtcgacactgccattggcgaacgccgcgccgccatccggggcttccaggtaacgcggggtgatatcggccagggtcaggccggcctttttcagggccgagatcagcaggtagttgctgcccgaacccttggacacggcaaccgtcttgcccttgagctcggcgatgctgtggatcggcgacgtgtcctggacgatgatcgcctgggcgcccggcgatgcgttttcctgggcgtaataggtcagcggtgcatcggcggcctgggtgaacagcgcgaaagcgtccgccacatcggcgtgcaggtcgacactgccggcgttcagcgaactgagcagaccggtgctgaattcatgccagttcaccgtgaaccccaggggcttgaggcgctgttccaactggccattttgcttgagcaggatccacagcgtggatgagcgctggtagctgatatccatggtttgctcggcctgggccgccgtggcggcgaacagcaggctggcggcgacgattaggtttttgaacgtcatgggaggccttggcgaggaagaaatgaagggcgctgcttatgccaaaaaaccacgtcaggcctggcaataaagcttgttcaattatattaacgatgagaaatgatgaaagaatcttataattctatggttatgcccaattcataggcggcagggaaaagcgtcctaagctcagatcgaaagagtatttaacgaatagtttttagaactttaagctcaggcctatttcgtcacagatcgagctcgccatgtccctacgtcaccccttcgccgcactcctcggcttgctggctctgtccgtcgccatcagcgcgcaggcccaggaaaccgtacgcatcggttaccagaagtcctcgaccctgatcaccctgctgaaaacccagggcaccctggaaaaagccctcaaggccgacaacatcgacgtgagctggcacgagttccccagcggcctgccgctgctcgaagcactgaacgtgggcaacgtggacatcagcgccgacgtggccgacaccgtgccgatcttcgcccaggcagcccaggccaaactcacctacttcgcccaggaagccccctcgccttcggcccaggccatcgtggtacgcaaggactcgccgatccagaacctggcggacctcaagggcaagaagatcgccgtgaccaaggccgccggcacccactatttgttgatcgccgcactggccaaggcggggctggccttttcggatatcgaaccggcctacctgtcacccgccgacggtcgcgcggcgttcgagaacaacaaggtggacgcctgggtcacctgggaacccttcctcaccagcgtgcagcgccaactgccaacacgcaccctggcggacggcgcagggctggccagctacaagcgctactacctgacgggtacgccgtacgccaaggcccacccgcaagtgttgaacgtggtgtacgcgcaactggaaaagaccggccaatgggtgaaaacccacccacaagacgcggccaaagtacttggcccgctgtggggcaacctggatgtcgcgacggttgaagcagccaatgcgcaccgcagctatcaagtgcagcctgtgacgattgatcagttgggcgaacaacagaaaatcgccgatgcgttcttcaaggcggggttattgcccaaggccgtggatgccaaggatgtacagacctggaagccttgaggcagccattgtaggagctggcttgccggcgaaagcgctgggtcagccgcttttccgttgctgatctaccgctatcgctggcaagccggctcctacagggggcgtcattcgcaggcaaaaaggtgcccccccgtatcccccggtgtcagggtagttgtcgtgtcctccgctttttaaaagtattccgggggcggcaagagtaaggtcatgcctttctattcagaagaacgcaaagctgcgctgttgaaaatga

SEQ ID NO: 12 - DNA, 746563 bp, Pseudomonas nodulensis
  misc_feature (298232)..(298605): n is a, c, g, or t
  misc_feature (387997)..(388031): n is a, c, g, or t
  misc_feature (396280)..(396357): n is a, c, g, or t
  misc_feature (522626)..(522674): n is a, c, g, or t
  misc_feature (570662)..(570736): n is a, c, g, or t
  misc_feature (683450)..(683488): n is a, c, g, or t
tgacacccgcccagcgccacgagggaaaagaccgggaaatcttggcccggagggcggcaatctatgggcaagcgagagaaaaaaggcctgaaaggtggtcaggcgagacacgcaactggaaccctatcgggacggtgtacctcaatcccgaaagggagctgacagttgtcgtgaaggtcgcctagcaagacgggagacacgacaactaccttgaaaaacgccggtatccacgatgcgaagcgagtcgctcttgatcctgcttttgatctaaggcgccccgtcaaacacgctggccggaattcgacagggatttggggggtaaaccggcagggatgccggtttagccgccccgcgccatggatggcgcgtggcggcggccccccaaatacctgtcggattacgggcacaccgagcctaggcgaggtgccgagtgttggggcaagagcgttttgcttacttttgactgggccggcattccggcttttcaaaagtgagccgccgtaagggcggaaccattagcagccgttacctaaataacggatatgtacctggtctgatccaacattctggtcggctgtcaggccgccttcgcgagcaagcccgctcccacatttggatcgcggggcaacagttggagagtggttggctgtcaggccgacttcgcaggcaagccagctcccacatttggatcgtggggtggcagttagagagcggttggctgtcaggccgacttcgcaggcaagccagctcccacatttggatcgtggggtggcagttagagagcggtcggctgtcaggccgtcttcgcaggtaagccagctcccgcatttggatcgtggggtggcagttagagagcggtcggctgtcaggccgtcttcgcaggcaagccagctcccacatttggatcgcggggcaacagttggagagtggtcggcagtcacaacagcgtgcgctccagcgcctttttccacgcagcataacgccccgccatagcaggatcatcctgcggctcaaaccgctcccgctgccgctccagcgcgcccaacgcgtcatcactcccccacacacccaacgccctccccgccaagtgcgccgcgcccagcgccgacacttccggcgacaggctgcgcaccaccggacgttgcaacagatcggccaaaaactgcatcaaccaacggttacgcgtcgcaccgccgtccacccacaactccttcaacgggctaccgatgtcctgctgcatagcctcaaagacatcgcgaatctgataaccaatcgactccagcgacgcccgcaggatatgcgcgccggaggtggcctcggtcagcccgcagatcaaaccgcgcgcatcagcctgccagtgcggtgcacccagcccggacagcgccggcacaaaatacacaccaccattgtccggcagttgcgcagcctgctcggtgagagcatccagggattctcccgccaccaggcgcgaggcccactgcacggcggcgcccgtatggacgatgttgccttccatgccgaacgtcggttggccgccgtcgtgccaggccagcgtggtggacaaaccgtgagtcgaggcaatcgggccgctcatgggcgtcattaaggaagaaccggtacccagtgtcgccttcaccagccccggcgcgaacccgccctgcccgtacagcgcagcgtgggagtcgccgatcatcgacatcaccgggatgccggcgggcaaaccacccgccgcgacggtttcagcaaagaaaccggcgctcggctggatcggggccaatgccgccagtggaatcttgaacagtgccaatagctccgggtcccaggcgcaggtgtgcaggttgaacagttgcgtgcgcgccgcgttggagtagtcggtggcaaacacctggccgccgctgagtttccacagcaaccagctgtccaccgtgcccaggcagatatcaccggcagcggcacgtgcgtgcccctcttcaaggtggtcgagaatccagcgcaacttgccggcggagaacatcgggtccaaggccagcccggttttttccaggatcagcgcctcatgtccctgctcatgcaattgggcacacaacgcggtggagcgccggcattgccaactgatgcacggcgacagcgcctcgccggtctgccggtcccaggccaccaccgattcacgctggttgctgatggccagcgctgtgatcgggcggtccacctgggccaggcattcctcaatggcggccagggtgctgtgccagatcagcagcgggtcctgctcggagaaccccggctgcggatgggtgatgctcagcggccgcgagcctcgggcaattacctgcccgcgcgcattgaccagcaccgccttggcgttgctggtgccttcatctatcgccaggatcagcggagtgttgtctgtcatcgcattcaccgcaaccgagtggcagccgccacaatcccagccgcgtcgatgttatgcaaggcgcgggtgggttcgcgggcgccggccgcggcatattcgccatcgccgatgcccaggcgcaccagggcaatgcccagcccggcttcggccagcacttcggcgaccaggctgccgatgccaccgttgatgttgtgctcctcgaccgtgatgaccgcccgcgtgccacgcagggcgctgagcaacacgtcacgctgcaatggccggatcgacgacaggttgatcacctgcgcctggatgccctgctccgccagcacccgtgccgcgtccaccgcttcatgcaccaccgagcccagggcgacgatgctcacgtctgcaccctgacgcaggatatccacctgccccggggcaaattgatagtcgcccgtgtgcacgtccggcaacgccttgccatccagacggatgtacaccgggccgtggtagcgcagcgcgtagtcgacgatctgccggcattcaagcgcgtcggccggggcaaagatctgcacgttgccaaaaccgcgcatcaccgaaatgtcgtcgaggctgtggtgggtgctggccaacgggccgtaactggcgccggcgttcaggccgaacatcttcacgttggcctggttgtagcaaacgtcgactttgatctgctcattggcccgcgaaatcagaaatggcgccgcgttgcaggtggcggcgatcttgccgcccagtgccaggcccgccgcgacgctgaccagcgactgctcggcaatgcccacgttgatcagccgctcgggaaagcgctgtacaaacggaccgatcttagccgtggaggtggagtcactgaccaccggcaccacgtccagtccggcatcgacggcggcaataaaggcctccaccatgacgctcgccaggtgttcactcgccatgattcaactcctccagtgccgcgttgatttcatcacccttgggcacgcggtggtgccattcgggacgggcttcgataaacgacacgcccttgcctttgatggtgtgggcgatcagcacctggggcgcaccggtcctggcctgcatgttttccagggcctcgatcaactggcccgcatcgttgccatcgcactcgctgacgcgaaaaccgaaggccgcccatttcacgtccagcgggtccagcggcatgatgtccgccgtcaagcccgccagttgcagcttgttcttgtcgacgatcacgaacaggttatccaggccgtatttcgccgccgccatcgccgcttcccagttggagccttccgccagttcaccgtcgccggtcagcacataaatgcgttttttgctgccggacatcttcgccgccagcgccagccccaccgccaccggcaggccgtggccgagggcgccggtgttcagttcgatgccaggggttttctgccgcaccgggtggcccggcaagtgggagttgaagtgctggtaggtgggcagccagtcgacggggatgtagcccgcctgcgccaggcagcaatacaaaccgccgacaccgtggcccttgctctggatatagatatcgcgctcagggtcgtcggtgcgttccgggccggtattgagaatgcggaaatacagggtcgcgagaatatcggtttccgagaggtcggccccggtgtggccgccggccggtgagtcggcattcaggcggatcacatggcgccggatcaggcgggcctgttctttgatctggtgggcgtcgtactggaaggcattcatgcagcggctcctttgaggctgaccacgcggggtgaaagtgtgcaaagctgtatttgaatatttattcagcagtgacaatatatttctatttagacgccgaacgctcgacaggtcaagtgaatgaccggggggaaaatgaaataaaacctggaaatgtccctcagacaaacggccaaaatcccacacgcgcttctctatcccgtggctttgcgccggatgaaagtcgcgatccagaggcctactggaaaaattaagcgcttgacattgccacggtggcactggaatctgaattaacagtcaagcacgcataaatattcacggcgcttgaaagcactccaaaaaaaataaatcaggagaacactgtggacgccaaagctactgtccagcatccggccgaactcaagccgccccaccgcccccggttggtgaaactgcttcccagcaatatcggcggcccgctgatcggcctgatgttgctggtgctggtcttctccttcagttccgaattcttcttctcgctgcgcaatggcctgaacattcttgaccaggtcacggtgctgggcatcctcgcaattggcatgaccgccgtgatcgtgatcggcggcatcgacctgtcagtggggtcggtgctggccttctcgatgatgatgctcggctggctgtaccaggaccaggcggtgccgctggggtttgcgatcccgatctcgattgccagcggcatgctcgccgggctggtgtccggcgccttgatcacctatgccaagctgccgccgttcattgccacgctgaccatgatgtcggtggcccgtggcctggcgaacatcctcaccgaaggccggcagatcgtcggttaccccgactggttcaccagcctggccacggtgcgtcacttcggtttcctctcggcaaccgtcgggctgttcctggtgatgctggtggtagcctgggtgttcctgcgctttcgtgccggtggccgtaacttgtacgccatgggcggcagcccggaagtggcgcgcctgtccgggatcaaggtgcgggcgatcaccctgtgggtgtatgccatcagcggtgcgctggccggtatcgccgccgtaaccctggccgcgcgcctggactcgtcccaacccagcgccggcctgagcctggaactggacgccatcgccgccgtggtgatcggcggcgccagcctcagcggcggcgtcggcagcatcggcggcaccctggtcggcgtgctgatcattggcgtgctgcgcaatggcctcaacctgctcggcgtttcgcccttcattcaacaagtggtgatcggcgtggtcatcgccctcgccgtgaccatcgacaccctgcgacgccgctccagtactgcccgttaaacctgttcgacagttgacaccctccaacaataaaaccaggagtcaccgacatgttcagccccaagaaactgctgttggccaccgccctcgcggccgccaccctcaccgctgccggcaccacgtgggccaaggacctgaccatcggcctggccgtggccaacctgcaggccgactttttcaaccagatcaagcaatcggtggaagccgagggcaaggccaagggcatcaaggtgattaccgtggatgcccagggcaactcctccacccaggtcagccagattgaagacctgatcactcgccagatcgatgtgctgatctacatcccggccggtgccaccgccgccggtgtgccggtcaaggcggcgaaagccgccggtatcccggtgatcgccgtcgaccgcaacgcccccgacgcgccaggcgatacctttatcgccagtgacagcgtggccggggccaagaccctggccgagtacgtcggcaagatcaccgatggcaaaggccgcatcgcgatcctgcaaggccagctcggcaccacccccgagaacgatcgcgccaagggcttcgaagaaggtttgaaagctttcccggacctcaaggtcgtcgcccagcaacccgccgaatgggctcaggacaaaggcttcgccgtggcccaggacctgctccagcgtgacccgaacatcacggtgttcttcggccgtgccgatgccatggcgttgggcgccgcccaggcggtgaaggtcggtaacctcgaccacaaggtggtggtggtcggttttgacggtgacgtcgccgggctcaaggccgtggaaagtggcgtgctgaacgcgaccatgacccaacagacccagaagatgggccgcctggccgtggcgtcggccatcgacctgaaagccggcaaggctgtgcccaaggagcaactgttgcctaccgtgctgaccaccaaagaaaacgtcgcgccgttcctgcaacagcacccgtaagccttggaggtcgtcatgcaagcagcagccctggacaccgctcgcgccgacgcggtgctgtgcctgcgcaatatcagcaaggcctatgggccggtgcaggtactgtcgcaggtcaatgtggacatccgccccggcgaagtgctggccctgctcggtgagaacggtgcgggcaagtcgaccttgtcgtcgatcatcgccgggctggtacagcctgaagccgggggcagcatgacctggctcggcgcaccttacgcaccggcgtcgcccggtgcggcactgagcgccgggatcggtctgatccaccaggaaatccgcctgctgccgcaattgtcgatcgccgagaatatcttcgtcggccgcctgcccatgcgtcatggacgggtggaccgcgcgtacatggaggcccaggcgcagatccagttggagcgcctggggctcaaggtgccggcatcgcgcaaggtcgaaggcctgagcgtggcggcccagcaattggtggaaatcgccaaggcgctgaccctcaaggccagcctgttgattctggatgaacccactgcggcattgggcggcgaagaaaccgagttgttgttcaaacaggtggaacggctcaaggccgagggcgtgtcgtttatctatatcagccaccgcctggaagaaatcgcacgcatcgccgaccgcgtgctggtgctgcgcgacggtcgccagattgccttgcacgccaccgcccaggtgccggtgcgcgagctggtggaacagatggtcgggcgtagcctggagcggattttcccggccctgcaagcaccacaggatcgcgtgatgttgcaggtcaaggacctcagctgtcgcgagtttgccttgcacggcatcgacttcagcgtgcgcgctggcgaagtgttcggtattgccggcgtggtcggcgctgggcggaccgagctggtgcgcacccttgccggcgcggcacaggatatccagggccacctggtgctcgacggtgaagtgcgccacctgcgctcgcccttcgaggcaatccaggccggtgtagtgctggtgcccgaggaccgcaagcagcaaggcgtggtggtggagcaccgcatcgaagacaacctgatctacggcaacaccgacctgttggacaagcgcggctgggtgttccctgccccgctgcgcgaattcgcccgcacggcggtggcgcggttgggggtgaagggtgcgccgcagtcgcgaatttcgagtttgtctggtggtaaccagcagaaggtgatcattgccaagtggctggcgcgcaatcccaaggtgttcatccttgacgagccgacacgcggcatcgacgtgggcgcacgggcggcgatctatgaagtgatcgcggacctggcggccaagggcatggcggtgattgtggtgagctcggacctcgatgaggtgctggggttgtcccatcgggtgatggtgatgagccggggccggcagatggggatcctggagcgtggcgcggccacccccgtttcggtgatggaaatggcgactgcttaaccagagaacaccgctgttttttgtgggagggggcttgcccccgatagcggtgtatcagtcacacacttttcaactgaaccactgccatcgggggcaagccccctcccacaggggtcagctgtgatttcaaataacggagttatccatgcagctttttagtcttgaaggccaagtggcctttgtcaccggcgcaggcagcggcattggccaggcgattgccgtggggctggccgaggcaggtgcggatgtggcctgcttcgatctaccgggcagccccggcatcgccagcaccgtcgaacgcatccaggccttaggccgtcgcgccctggccttgagcggtacggtcaccgagcgcgccgcactggatgcagcggtcgcgcgcaccgaagccgagctgggcgaactgagcgtcgcggtcaattgcgccggcatcgccaatgcccaggccgccgaagacctcgaactgcaacgctggcaaaccaccctggacatcaacctcaccggcattttcctcagttgccaggcccaggccgccgtgatgttgcctcggggaaaaggagccatcgtcaatattgcctcgatgtccggcagcatcgtcaaccgtggcttgctgcaagcgcactacaacacctccaaggccggcgtgattcacctgagcaagagcctggcgatggaatgggccgacaaaggcttgcgggtcaattgcatcagccccggctacaccgccacgccgatgaactcgcgcccggaagttgccgaccaggtgaagatctttgaacagaccacgccgatgggccgcatggccagcgtggaagaaatggtcggcccggcgattttcctggtcagccaggcctcgtctttctgcaccggtgtcgacctgttggtcgatggcggctttgtgtgctggtaggagttcgtcatgtcccaacgattcagcggtaaaactgtggtcatcaccggcgcctgccggggcatcggcgccggcattgccgagcgcttcgcccaggaaggcgccaacctggtactggcttccaacgacttggaacgcgtgaccttcaccgccgaccaactggcccgggaataccaggtcgacaccctggccctggccatcgacgtcacccgcgaagacgatatcgaaacgctctaccgcgaaggccacgcgcggtttggcagcatcgacgtgtcggtgcagaacgccggcatcatcaccatcgaccattacgacaaaatgccccgcgccgatttcgacaaggtgctgcaggtcaacaccaccggcgtctggctcggctgccgggaggcggccaagtacatggtcaagcaaggcagcggccggctgatcaacacctcctccggccagggccgccaggggttcatctacacgccccactacgccgccagcaaaatgggcgtgatcggcatcacccagagcctggcgctggagctggcgcggcataacatcacggtcaacgcgttttgccccggcatcatcgaaagcgagatgtgggactacaacgaccgcgtgtggggcgagatcctcagcaccgacgagaaacgctacggcaagggtgaattgatggccgaatgggtcaggaacatccccctgcgccgcgccggcaaaccctcggatgtcgcgggcctggtggcgtttctggcctcggacgatgcggcctacctgaccggccaggcgatcaatatcgacggcggcctgatcatgtcgtaagggtttggtatcctcacggccattgagtcatgccttttactataaagagccctgaggccttcatgagccagatcgaagaacagcgcctgatcaccaagatcgcgagcctctattacgaagaagggctcaagcagtccgagatttccgcgcaactggacctgtcccaatcctttatcagccgcgccctgcgtcgggcgctgcaggaaggcgtggtgaagatcacggtgatgcgcctgcaaggcctgcacctggagctggaaacccagttgcaacgccgctacggcgtgcgccgggtgatcgtggtggaagccaccgagccgggcaatgacgagagcatcaagcaggccatcggttcggccgccgcccactacctggaaaccagcctgtcgccccaggaccatatcggtatttcgtcgtggagcagcaccattcgcgccatggtgagccacctgcacgcgcaaccgggcaaacaggcagcccaggaagtggtgcaactgttgggcggcgtcggccacaagggcgcgtttgaagccacgttgctgacccagcgcctggcgaccctgctcaactgcccggcgtttctgctgccctcgcaaagcatcgagcaatcggtggagagcaagcagcgcatcgtgcagatggaagaggtcaaggaagtgctgcagcgctttgacagcatcaccctggcgattgtcggcatcggcgacctggagccctcgcaactgctgcgcaacagcggcaactactacaccgaagacatgctgcgcctgctcgccgaacgcggcgcggtgggcgatatctgcctgcgctacttcgatgcccagggccagccggtgctggaggaagatgaagaattcgtggtgtcggtggcgctgcccaagctgcgtgccatccaccgagtgctcggcctggccggtgggttgaacaaggtccaggccattcgtggcgcactccagggcggctacctggacatcctgatcaccgacctggacaccgcacaggccctcaaccaataaccctttttggagactgccgctcatgacgtccaagctcgaacaactcaagcaattcaccaccgtggtgtgcgacaccggcgacctggaagccatcagccgcctgcgcccggtggatgccaccactaacccgtccctgctgctcaaggcggccgccatcccggaatatgccgagttgctgcgcagcgcggtgggccagtccaagggcgatgtggacctggcctgtgaccgctttgcggtggcggtgggctgcggcattctcaaggtgattccggggcgcatctccaccgaagtcgacgcgcgcctgtccttcgacgcagacgcattatgggccaaggctaaccagttgatcgcgctgtacgaccaggccggcgtcggccgcgaccgcgtgctgatcaagctggcctctacctgggaaggcattcgcaccgccgagcgcctggaaaaggccgggatccagaccaacctgaccctgctgttttcgttcgtccaggccgccgcctgcgccgatgcaggggtgttcctgatttcgccgttcgtaggccgcatctatgactggtaccgcaagaacaccggcctggactacaccggcgccgaagacccaggcgtgcagtccgtgacgcggatctacaactactacaaggccaacgccatcaacaccgtggtcatgggcgccagcttccgcaccctcagccagatcgaacaactggccggctgcgatcgcctgaccatcagccccgagctgctgcaaaagctcgatgaagaccagggcctgctggaacgtcgattgaatccgggggcggttggcgagccgcgccagaccctcaacgaggcgcaattccgctggggctccaatgaggacgcgatggccaccgagaaactggccgaaggcattcgtcagttcgcccgcgaccaggaaaaactcgaggcggtcctcgcagccctatgagccctgccctgtcgctgagccagcctcgcaccctggtgttcctggcctacccccagatgggcctgctcgacctgaccggcgcccagaccgtgttctgggccgccaccaaggccatggccgagcgtggcttgccgggctacgtgatgcacaccgccagcctggccggcggcctgatgcagaccgccgaggggctgagcgtggacacgctggcgctggagcacctggacacgcacgtcatcgacaccctgatcgtgcccggcgcgccggcgatccaacaggcgatggccgccaataccgagctggtgcaatggctgcgcgtggcctccgccagcgccgggcgcaccgcctcggtgtgcagcggcaccttcctgctggccatggccggcttgctcgacggccgccgcgccgccacccactgggccatgtgcgacatgctcaagcagggtttcccggacattatcgtggacatggacgcgatctttatccaacagggcaatgtgtggacgtcggcgggtgtgaccgccggtatcgacctcgcgctggcgttggtagaggccgattgcggacggcccgtcgccctgcaagtggcgcgggaactggtggtgtttctcaagcgccccggaggccaggcgcaattcagccaactgctgcaagcgcaaaccgacgacaccgccggtttcgatgccttgcacctgtgggtcgccgacaacctcagcgacagcgacctcaccgtggagcgcctggctgaacaaagccgcatgagcccgcgcaactttgcccgggtctacaagcagaaaaccgggcgcacgccggccaaggccatcgagctgtttcgcctggaagcggcgcggcgcctgctggaagactcccagcgcaacatcgaccaggtcgcgcaactgtgcggcttcggcgacgaagaacgcatgcgctataccttccagcgtcacctttcgatctctccccgcaactatcgcgagcgcttttcacgctgagcgcctgcggcctggcagtaattcagggttatgtgtcctaccagacaagcagcgctgcttttacagtgagccggcaacgcctcaccgcttgagcaaacgaattgacctggtccctggaacatcccatgaaacagcacatccttattatcggcgccgggttcggtggcgtctggagcgcgttgagcgctgcgcgcctgctggacaaacatgatcgccacgacgtgcagatcagcctcctcgccccacagccggaactgcgcatccgcccacgtttctacgagcccgctgtacacaccatgcaggcgccactgggtccgttgttcgaagccgtgaacgtcaagttcattcaaggcgcggctgacagcatcgatgaaaacgccaaacacgtgacctaccgggatacggccggcatctccaccacgatcccgtacgaccgcctggtgctcgccgccggcagccgtctgaaccgtccgcagatgccaggcatcgagcatgtcttcgatgtggaccagatcgaggatgccacgcgcctggaagctcatatcaccgcgttgaaaaacctgcctgatagtcccgcgcgcaacacggtgctggtcgctggcggtggtttcaccggcatcgagacctccaccgaaatgccggcgcgtctgagggcagccttgggtgacgatgccgatatccgcgtcatcgtcgtcgaccgtggcccgcagattgccgcctccatgggcgatggcatccgcccatcgatcatcgaagccagcaacgcactgggcctggaatggatattgaacacgtcggtggcttcagtggatgccagcggcgtgaccctggcggatggacaacgcattgaatcgaaaaccgtgatctggaccatcggcttccgggccaacccgctcaccgagcaggtcagcggtgcccgcgatccccagggccgcctgcatgtagacggcaccctcaaggtcaagggccaggccgacgtgttcgccgccggtgacgtggcttacgccgccaccgacgacctgggcaactttgccggcatgtcctgccagcacgccatcgccctgggccgctatgccggcaataacgtcgccgccgacctgatcggcgtggcgccgatgacctaccgacaacccaaatacgtgacctgcctcgacctcggcgcctggggtgccgtgtacaccgaaggttgggatcgccaactgaagctggttggtcaggaagccaaggacctcaagcatcagatcaataccgtgtggatctacccaccggccgccgagcgtgctggcgcgctggcggcggccgacccgttgattccggtggcctgaagcccgtactcccgggcgcccgccgctgttgttcaggcgggcatttttttgcggcattcatccattgatcgagccgccaccgcgcccatcaccccgcccaccatcggcgccagccagaacagccaaagctgtgccaggtaatccaccccggcaaacaacgccggcccggtgctgcgcgccgggttgaccgaggtattggtcacagggatcaggaccaggtgaatcaaggtcagtgccaagccaatggcaatcggggcaaagccaggcaccgcgccgggtgcggtgacgcgcataatgatgaagacgaagaaaaacgtggcgatcagttcagccagcaacgcggacttcatgtcgaaatgaccggggctgagcggaccatagccgttggcggcaaaaccgcccaccgcgaaatccggctgcccgttggcaatcaggaacaatgtggcagcggccgtaatcgcccccgcgacctgcgccacgatgtacggcagcacatcagcgccctcgatacggcgccccacccacaggccgagggtcaccgccgggttgaaatgcccgccggaaataccgcccagcgcataggccatggtcaacaccgtaagcccaaacgccagggaaacgcccacaaaaccaatgcccaacccggggaaagcagccgccaggatggcgctgccacagccgccgaaggtcagccagaaagtaccgatgaactctgcagtcaaacgtctttgcacaatcaactccattgcagctcaagtgccgtcgccacgggaggtgggcggtccggggcgacggtagcaatgggtatcaatatgtcctgtaagacttgtctggttttaacggcttacaacgccctgcccaaatttcctgatcgccaggcagtaaccgatcaacgctaccgccgccagcaacccaccggccgcgccgatccaggcgaagccgaactggctgccgacccaactgcccatcagcgcaccgccgccaatgccgatgttgtagatgccggagaacatcgccatggccacgtcggtggcgtcgggtgccagcaccaacaccttggattgcatggccaggccaaagcccatgatcgccatgccccagaaaacgctcagcaccaccaggtaggactcggcaccgctcaagggcagcagcaacgtcaggcagacggccaggataaacaccgcgcccaccacgaacaggtgcgggttgaaacggtgcaccaggctgaacagcagcgagccgatgatgcccgcgccgccgaacaccagcaggatcagggtcaccgcgctgccgctcatgccggccacgcgttcgacgaacggttcgatgtagctgtaggcggtgaattgcgcagtgacggtcatggcggtcagcacatacagcgccaccagcgccgggcgcttgaacagcagcggcaggctgcgcaacgagccggagttctggctcggcaacagcggcaaggtgcgcgccagccagaacaccagcgcagcggcgaacgcgccgatcaccaggaacgtggtgcgccaacccatggcctcgcccagcaagcggcccaacggaatacccagcaccatcgccagggaagtgccagtagccagcaggccgagggcttgcacctgcttgccttccggcgccaggcgtaccgcgagtgaggcggtgatcgaccagaacagcgcatgggacagggcgatgccgatacgactgagcatcaggatgccgaaactggtggcgacactggaaaggatatgactggcgataaacaggccgaacagcacgatcagcagcttgcgccgctccacgttgcgggtcagcagcatcaccggcaatgaagtcagggacacgatccaggcatagatagtgagcatcagcccgacgctggacaccggcatgtcgaaactggcgccgatggcactgagcagcccgacgggcacgaattcggtggtattgaacacaaacgcggccaacgcgagagcgaagaccggttgccaattggcttggggcgttgcggctgaaatgctcatggaacggcgcggtactctggcagtgatcaagcgggggcggtgatcgagcggccacccaggacaagcgccgccgccgagcattctataggtttccggcccgactgttggcgctcatcccgctcaaaatgacctcaaccgggtcagggtgccgtcatggtgaccacgtaggcgcccgattgaaccggcttgccgagggcatccaccagcacataccgctggtcgaaatagcgcccgttggggctgtcggccaccaacttgacgttgaccgccgaattgcccagcgcggtcacactgcgcaccgactgtgcctcgaactggctgccacgcagggcttgcgggcatccattgaactccactgtcgccccgcccgacgtactggggttacaaccgggctcgacgatgctgccgtgaaattgaatgacaccggaagatgccgccaggcatgcccccgtccataccgcaagaacaccggtaaccagtgacaaacgtaaaacgttcatgtcgacgctccttcttgggctgttaagaagtaagtcgtctggcccggcgtttacttgaggttattcgtcggtgtctgaaagaaaagttacgggtccacctgccccatcaattccggaatcgactccggccgattcgcataacgctgggccaacgccgcgcagaccatcaactggatctggtggaacagcatcagcggcaggatcagcacgcccatgctcgccccggcgaacagcacctgggccatcggcacaccggtggccaggctctttttcgaaccgcagaacaggatagtgatgcggtcttcctggttgaaaccgaacgccttgccgagcaccgtggacgccaccaacaccaggcccagcaacacgcagcacgccactaccaggccacccagttcccatagcgggatctggtgccagataccttcattcaccgcttcgctgaatgcgccatagaccaccagcaggatcgagccctgatcgacgaatttcagccaggacttgttgcgcccgacccactcaccaatccagcggcgggcgatctgcccggcgataaacggcagcagcaattgcacgctgattttcaggatggcgtcgaccgtcgagccgccgtcgccgtgcacattgagcagcagcgtcaccagcaacggtgtcaggaagatgccgaacaggctggacgccgccgcgctgcagatcgccgccgggatattgccccgcgccagggacgtgaacgcaatcgccgattgcaccgtggccggcaaggcgcacaggtagagcatgcccatgtacaggtctttgccgatcagcggcgacagcaccggcttgagcgccaggcccagcagcgggaacagcacgaaggtcaggctgaacaccagcagatgcaggcgccagtgcccggcgccggccacgatggcctggcgcgacagcttggcgccgtgcaggaaaaacagcagcgcgatggccaggttggtcacccagccgaaggccacggcggtctggccgctggcgggcagcagggaagcgagaatcaccgtggcgatcagggtcagggtgaagttatcgggcaggaaacgggggcgagtcataagcaggatcttccgggggttgccaagagcgtcatcgcgactctaacgtaacggcttgttaccgactaacgccaacgagccaacaaatgccgcctaaaggacatgccaacaccgtgcgccgtagcgtgccagggctttccagcctgccacggccggtgtatgggcgcaccgaatcgctgcccaaccgtgcgctgacccgccggcacagccacccatgggtgcaattgtcctacgcaatttccggggtgctggagatccagaccagcgttggccgtttcgtcgcgcccccccagcgcgcggtgtggattccagccggtgtaccgcatcgggtgttcagttcgccccacacagagatgcgcagcctgtacctggattgcagcgtcaccacctgggcggccgagcgctgtcatgtgctggcggtgagcagcctgctgcgcgagttgatccgcagtttcagcgaactgccggtagaatatgccgaggatgggccggacgggcgcctggcccaggtggtgctggaccagctggcggcggcgccgcacgtcgacctgatgctgccactgccgctggacacacgcctgcggccgatctatcgcagcctgagtgcgcacccggaacagcaaacgaccttgggccagtggagccagaaactgggggtgagcgagaagaccctcagtcggttgttcttgagcgacaccgggctgacgttccgcgcctggcgccagcgcctgcgcttattgagcgccctgcccgccctggagcaaggcgagcgggtcacggatgtggcgctggggtgtggctatgagtcgacgtcggcgtttatcaatgcgtttcggcagcaattcgaggccacgcccggcgaatttttccgctgacatcagctgccattgccgccatgggcctcttcgaagaagtagtccttccaactggcggccttgtttttcagcacgcccaatgcctgcaatttctcggcgtagatgtaggtacgctgcggcacgatggtgaagtcgatttccgggtcctggacgattttttccaccaggtccaacggcaacttcgactgttctacgcggatataggccttggctgccgctggtttatcggccttgatgatcgtctcggcttcggccagcgcggcatagaacgctttgtaggtcttggggttttcgtcgtggaatttctgcgtggtgtagagcacgttgaacgtggccggcccaccgaggatgtcgtaggaactgagcaccttgtgcacattcggattcaacagttcctggtactggaacggcgggctggagaagtgcgcgttgatctccgatcccccggcaatcagcgcggcggtcgcatcgggatgggccaggctgatggagatgtcgtcgaacttcttgaagctggcgtcgccgaactgcttggcggtctcgatctgcaaggtgcgtgactggaaacccacgccggcggcgggcacggcgatgcgatctttttcgctgaagtccttgagggtcttcacgttggggttgttggtcagcaggtagttgggcatcgagcccagggaggcgatggccttgacgttctgcttgcccttggtgcggtcccacagggtcagcattggcggtacaccggcagagactacgtcgagcgcaccggccagcagcgattcgttcatggcggtggcgccggaaatgctgttccactccacctggatatccaggccttgttccttgccgtgtttttcgatcagatgctggtcacgcaccacgtcgaggatcaggtagccgatgccgaattgctgggcgatgctgatcttgccttcggcctgggcgccgatactgatcagggccgtcgcagccgccaacagggtcagggaggaacgcttgaaagtcatgggagtctgccgcgtttttaagaaggtgatggagcctagcgacgtttttttagactggaaaagaatatctggatctattgttatgcaaatggcccacaaaccagcgcccggctgctattgtgccgcgctttgaaaaactgccgaaccagcgaggaaatggacgttgaacactgacgaaaaaatgaccggggacctgttcgaggtggataagcgcctgtcactcaaacccgtggtggacttcaacgcctacctgcgcagcgcgttcggcgacggcccgtgcagctgcatccgctgcaccagcggtaacggtgatgaaagcggctatgagttccagcacagcttcaccttcgacggcaaacccacccagcgccgcttcgccaccacggcgggcagcgatgtgttgcaagtgttgaagaaggcctggttgtcgtacaccaaggccgagctgccgttgagcggtgtgctggcgctggatacggtgaaggagtttgtcgagccgcagttgcacaagcggttgataccgctgtttttggccagtgggttggtcaaggacgtagacggagcgttgcaggttcagccgcaggcagcgtaagccacattttgtggagcaggcagatggttgtggcgagcgggcttgccccgcgctgggcaagcccgctcaccacaattacactgaagtgatcacttacgcgccgcctcccactgcttcagcaggtcaccgtaagccacggtctcacccttcggcttctcgttggccagtttcggtttcggcgcgcccggctggtcgaaccagtattgcgcgtcacgctcggggttcattttcgggccgcacaccggttgcaccttggagcgttccaggcgcgtcatgatcgcgtcctgctccttggccaggttgtccagcgcttgctgcggggtttgctcgccgctggcagccctggcgatgttgctccaccacaactgcgccaggcgtggatagtccggcacgttggtgccggtcggggtccactcgacacgggccgggctgcgatagaactccaccaggccaccgagtttcggcgccatgtcggtcatagcctgggagttgatgtcggactcacggatcggtgtcaggccaacgatggttttcttcagcgagacggttttcgaggtcacgaactgcgcgtagagccaggccgcaagtttctgtttctcaggtgtcgacttgaggaaggtccaggagcctacgtcctgatagcccttcttcatgcccttttcccagtaaggtcccacaggcgacggcgccatgcgccatttcggcgtgccgtcggcattcaccaccggcaggcccggcttggtcatgtcggcggtaaacgcggtgtaccagaagatctgctgggcgatgttgccctgggacggcaccgggccggattcggagaaggtcatgcccgcggcttccggtggcgcgtaggctttcatccaatccacgtatttctgtgtggcaaacactgcggccgggccgttggtgtcgccgccacgggtgacgctggagcccaccgggtggcagtcctccacacgaatgccccactcgtccaccggcaagccgttgggcaagcccttgtcgccgccaccggccatggagaaccaggcatcggtgaagcgccagcccagggacgggtctttcttgccgtagtccatgtgcccgtagacacgtttgccgtcgatttccttgacgtcttcgctgaagaacttggcaatgtcttcataggccgaccagttcaccggcacgccgaggtcatagccgtatttttccttgaacttggctttcagctccggacgctcgaaccagtcggcgcgaaaccaatagaggttggcgaactgctggtcgggcaactggtagatcttgccgtccggcgcggtggtgaaggagataccgataaagtccttgatatccagggtcggcgaggtgaagtccttgccttcgttggccatcaggtcggtgatggattcagtcttgccgtagcgaaagtgcgtaccgatcaggtccgagtcgttgacccagccgtcgtagatgtttttgtcggactgcatctgggtttgcagcttctccaccacgtcgccttcctgcaacaggtcgtgggtcagcttgatcccggtgatttccgtgaaggccttggccagcaccttggactcgtactcgtgggtggtgagggtttccgacaccacgttgatcttcatcccacggaacggttcggcggccttgataaaccacttcaattcctccagttgctgatcggccgtgagggtggacggtttgaactcgctgccgatccattttttcgcagcatcttcgtacgcatcggcccaggccgaagcgctcaaaccgctcatagccagtacggcggccaatgaaatgctatgtcgcagcttattgttcttattcaacatagagacctcctggttgtttattcataagggcactagccccaacgcatcacactcaacagccataccagggagagcgcggacgctacccagatgctccagtcggtaacgccgatcaccagcaaatgcaggtaggcgctgccgagaagaccgataaacaaacgatcaccacgggtggtgctgatcggcaaaaagccccgccgggggatgctcggcgagcgcagttcccaagtggtcatgcccgcaaggatcagggctatgccgccaaagaacagcgcggtgggggtggtccaggccatccattccatcatcgactcctcagacccggcccagggcaaagcccttggccacgtggttgcgaacaaaccagatcaccagcatgccgggaaggatagtcaacacccccgccgccgccagcacgccccaatcgatacccgacgccgacaccgtgcgcgtcatgactgccgcaatcggcttggcgttgaccgaggtcagggtgcgcgccagcagcagttcgacccaggaaaacatgaagcagaaaaacgccgtcacgccgatgccggagccaatcaacgggataaaaatcttcacgaaaaacttcggaaacgagtagccgtcgatgtaggcggtttcgtcgatttccttgggcacgccggacatgaacccctccaggatccacaccgccaacggcacgttgaacaggcagtgggccagggctactgcgatgtgcgtgtcgaacagccctatcgacgagtacagctggaagaacggcagcaaaaacaccgccggtggcgccatgcggttggtcagcagccagaagaacaggtgcttgtcgcccaggaaccgataacgcgaaaacgcataggccgccggcagcgccacactcagggaaatcaccgtgttcaggctcacgtagtacagcgagttgaggtaaccggtgtaccagctcgggtcagtgaagatcaccttgtagttggccagggtgaagtcctgcggaaacagcgtcagcccgccgaggatttcggtgttgctcttgaaggacatgttcagcagccagtagatcggcaccagcaggaacaggatgtagaccagcagcgggatcactttcttcataaacgtaagacgtttgctcatgttggcggcctcagcggttggcgtcggagtgggtcatggcggtgtagaacagccaggacaccaacaggatgatcaggaagtacaccagggaaaacgctgcggccgggcccaggtcgaattggcctacggccatctgggtcagcgtctgactcaagaaggtagtggcgttacccggtccaccgcccgtaagcacgaacggctcggtgtagatcatgaaactgtccatgaaccgcaacatcaccgcgatcagcagcacgcttttcatcttcggcaactggatatgtcggaacaccgcccagggcgatgcacgatcgatccgcgcggcctggtagtacacgtccggaatcgcccgcaaccccgaatagcagagcagcgccaccagtgaggtccagtgccagacgtccatgaccaacaccgtgacccaggcgtccatggtgttggcggcgtagttgtaactgatgcccagggcgttgaggctgtaacccagcaggccgatatcggcgcgaccgaagatctgccagatggtgcccactacgttccacgggatcagcagcggaatggccaggatgatcagcaccagcgacgaccagcggcccttggtcggcatggtcagggcgatggcgatgcccagcgggatttcgatcagcagcacacaggccgagtagatgaactgacgcagcagcgagtcatgcaggcgcgggtcgagcagcacctgcttgtaccagtcggcaccgacgaagtagcggctggactggtcgaagatgtcctgcaccgagtaattgaccacggtcatcatcgggatcaccgcactgaacgccaccagcaggaacaccggcaacaccagccaccaggccttgttgttctgcaccttgttcatggctgcacctccagcaggtagtcgtcggcatacaccatcagccattgcgccggaaagctgatggacgccttgccctcaggcaccggcttgtcttcggccaggcgcacttttagcagcgcgccatcgaggttgagagtgatgatcttgtaggtgccgaggtcttcgaggtgagtgacatcggcctgcagggcgtcagggttgtactcgtcccagacatggatgaattccgggcggataccgacctgcaatttcttgtagtcggtcgtggcaatgcgttgctgcacggcctcggacaagggcagatgggtgccagcaaagcgcaccccgcccgcctcagcctgcacctcgatcagattcatcccagggctgccgatgaaatagccgacaaaggtatggctgggccgttcgaacaggtcacgcggcgtaccgaactgcacgatctggccgccgtacatcactgcgatcttgtcggcaaaggtcgaggcctccagttgatcgtgggtcacatagaccatggtgatgttgaattgctcatggatctgcttgagcttgcgccgcagtttccacttgaggtgcgggtcaatcaccgtcagcggttcatcgaacaggatcgccgacacgtcgtcgcgcaccaggccccggcccatggagactttctgtttttcgtcggcggtgaggttgcgcgcctttttggtcagcaggttttgcaggtcgaggacttcggcaatttcctgcaccttgctgtgaattttcgcctcggccatgccctggttacgcagtgggaatgccaggttatcgaacaccgtcatggtgtcgtacaccaccgggaactgaaacacctgggcgatattgcgtttttccggggtgaggtcgttgaccacttgggtgtcgaacagcacctggccttcggaggggctgagcaggccggagatgatattgagcaaggtcgacttgccgcagcccgacggcccgagcaaggcgtaggccccgccctgctcccacacgtgattcattgcccggatggcgtagtcctcaggccctttcggcgcagggctgtagctgtgcgccaggttctgcaaatggatctcggccatcaggcaaccctcgcgacacggcgcccgggggcctggaccaaccggccctggccatcgaacacaaacagtttatgggtggggatatacacgcggatcggcgcgtcgacgtcgtattcgtgcacccccggcaggtgcagcaccagcaggaagtgctcgctgcgcacatgcaggaaggtttccgaaccgctgatctccgcgacttccacggtgaccgccagttccaggtcgtcatcgttgctcggcaccaggctgatatggctggggcgtacgccgaaccggaactcgccttcgccgatgggacgcaggtcgacgttcagcgggaagtgcacgaaattggcgaagctcacctcgttgccactgatacgccccggcatcaggttgatcggcggctcggaaaacagctcagcggccaagacggtctgcggctggtgatacacctcggccgccttgccgctctggatcacccggccttcgtgcaggatggtggtggtgccgccgagggccagggcttcgttgggctcggtggtggcgtagatggcgatggtgtggcgcgctgcgaacagttcgcgcatttcctgacgcagctcttcgcgcagtttgtagtccaggtttaccagcggctcatcaaacagaatcagctcggcatccttgaccagcgcgcgcgccatggccgtgcgctgctgctggccaccggagagttccagcgggtgacgctggaggaatttctcaatgcgcagcatttttgcggtttccagcactttgctctggatcagttcgttggacacaccggcctcgcgcaagggcgaggcgatgttttcgaacacggtcatggtcgggtagttgatgaactgctgatacaccatcgacacgttgcgcaggcgcaccggtttttgcgtgacgtccacgccgttcatcaggatgcggccgctgtcgggcttgtccaggccggccatcaggcgcatcaggctggtcttgccggacagcgtacgaccgagcaagacgttgaaggaaccggcttcgaaacgcaggttggcgtcgtcaatccaggtctggccttcgacaacgcgggagacatgttccagggtcaatgacatgacacgacctttttattattggaatgaatctggccagatgacagagcgagtttcatgccaaaacggcaagttattgatgtgcaaggaaatggcgtaaatgggatgttcgggagtgaacaatctgactgaacaactgaacaatccgggggttgacaatgaacagttctgaacaacactctcatgaccaacacagggcaaatgtgggagggggcttgcccccgatagcggtcagtcagatacagattcatcgactgaaccaccgctatcgggggcaggccccctcccacattgacccggttccaatcgttaaatagtgcaagaccccataacaataaaaacgaaggtcaccccatggccgaaccactggctcacgacacccttatccaggaatcctggcgccgttgccgcgcctttggcctggaccaccagagcacgcccagcttcgatcaactgcctgccgagggcatcagccaattgctggagagccagcattcgctggtgcagaccacccaccaggaagtgctgccctactacgagaacatcctgagcaattccaactgcctgatcatgctggccgacaaccaaggccaggtgctgaccagttggggcacccagcgctttatcgagccgaagctggcccgtggtttcaacccgggagccagctggatggagcgcgccagcggcaccaatgccatcggcactgcgttggcctgcgcccaggcggtgcatatcgaacacgatgaacacttcctgaaggccaaccgtttcatgacgggctcggcggcaccgatcttcgatgcccagcgcgagatcatcgcggtgctggatgtgtccagcgacagttacctgccgccctcccacaccctgggcatggtcaagatgatgagccagaccgtggagaaccggctgatcctcaacctgtttcgcggcgaacacttccaactgaccttcaataccgggctgagcaacctcgacagccagtgggccggcctgttgatctttgatgagagcggccaggtgctctcggccaatcggcgtgccgacaacctgctgggcatcagcctgtcgcgggtgatgatcgacagcctgttcaaggtgtcgttgctggaactgttgaaccagccggaaggcctgcccttctccctgcaagcggcgggacgcaaccgcttccaatgcttgttgaagcggcccaagcagacgccggtgcaagcgcgcgtgttcaccgcgccggcgccatcgaagcctgcgccgattggcctcaagaccttgcacttcggcgacgcgcgcgtggagaaagccgtgcgccaggccgagcgcctgctggagaaggacatcccgctgctgatccatggtgaaaccggcgtgggcaaggaggtgttcgtcaaagccctgcaccaagccagctcgcgcagccataaggcgtttatcgcggtgaactgcgcggcgattcccgccgagctggtggaatctgagctgttcggctacgaaaaaggtgcattcaccggcgccaaccagaagggcagcatcggcctgatccgcaaggccgacaagggcacgctgtttctcgacgagatcggtgatatgccgctgcccacccaggcccgcttgctgcgggtgttgcaggagcgttgcgtgcaaccggtgggcagcagcgaattgttcccggtggatctgcgcatcatctcggccaccaaccgtgcactgcgggagttggtgcaggccgggcgtttccgtgaggatctgtactaccgcatcggcggcctgaccctggagctgccgccgttacgcgagcgcaccgataaacaggcgctgttccagcaactgtggcagcagcaccgcgagccgactcaatgggcgggcctgagcgccgaagtgctggcgctgttcgagcagcacccgtggccggggaatttgcgccaggtgagcagtgtgttgcaggtggcgctggccatggccgaggaacagccgatccgtgccgagcatctgccggatgatttcttcgtggatctgaaagttaccgcgccactgcccaccagtgagtacctggatgacagcatcgacctgaaccagcgcttgaaggccgccggcggcaacatctcccacctggcgcgggagctgggggtgagccgcaatactctctacaaacgcctgcgccagaacgaaaactagcgcggcttgaccaccaccagcagatcggtgaagtactccacctgaatcggcaggttatcggccagcgacgacaacgccgccgccgtgtcgtccagcttgaacaccccggatacccgcaggttttgcagggcctgggggtcgaagcgcagcatgccgtggcgatagctggcgagggtttgcaggacttcgctcaggggttggtcgttgaccttgagcaggccccgggtccaggcgtcggggtcgctgtcgccaatggcttgcggcggctgggcacgaccgtggtcgagcaccgagcgctggccggctgtgaccttgactccttcgttgctttcacctttgaccgctaccgtggattcgatcaccgtgaccagcgtggtgccgtctgccgcgcgcttgaccagataacgcgtgcccagcgcagtggccgtgccctggtcggtacggaccacaaaggggcgttgcgcatccttcgccacctcgacccagagctcgccttgcagcagttcgatcacccgttgatggccgtcgaacttcacatccactgccgagttgctgttgagctgcaactggctaccgtcttcgagggcgatctgtcgccgctcaccgacaccggtacgctggtcggccatccacaccggcaggtgttgcaggcccagccagccgcaccaaaccaggccgagcacgcccatcacctgcgcgccacgcgggcgtcgcggggtgaaggcgcggttcagggccatgcgcgcgggcttggcgggcaaggcatcgaggctgccccataacgcactcatgcgctcgatggccacggcgtggcgcgggtcggcctggcgccaggcgttgaacgcctggcggtcggcgtcggtcacgccttcgtcgtgcaggcgagtcagccactgcgctgcttgctggatgatctgctcggaactcatgccagcgggtctgccgggtgcaggctgtggtagcaatgcaccagggcgctggaaatgtagtttttgacggtgctggaggaaacgtccaggcgcagggcgatttcgctgtaggtcagcccgtcgaggcggctcaacagaaacgcttcgcgggccttggcaggcaggccggcgagcatctcggcgatgcgttccagggcttgcagcgccacatgaatcgcggccgggtcgggcatgccggcgtcttcacactggatcaccagggcttccatgtaggctttttcgatacggcgacgacgggcgccgtcgatcaacaaccggcctgccgtggtggccaggaacgcgcgaggttccttgatactttgcggctcggccagcatcagcacgcgaatgaaagcgtcatgggccaggtcggcggcatgctgggaacacccgagtttcttgcgcagccagccgtgcaaccagccgtggtgctcgctgtacatcgccgtgagggtctgctggcgaacggagtcgcccagcgcggccggaatgtcatgcatgcgcaaaaatatctcaaatgggaagagttaccaattgcgcgaacaatgccagtaaaacctgcttggggcaagggcctgtctttaacgccaactccaggacacgccggtatagatgccacgaccatccgccggcgtagagcgcgctacatccaaccccttgtcgtcataacccggcgtcacggtattggcgtaacgacggttggccaggttgcgcaggtcgacccaggcttgccagtcctgcttgggcgcgtcgtagccgaacgtggcgccgagaacggtgtaggacgcggcatagtaggaattggcgtagtccaccgccacccgcgaggaatactcggtgttgaggctggtgtagaaacccgtcggatggctgtagcgcacttgtgcctggtagtagtgcttggggatgcccggcaaggtgttgtcgccgaagcggtcatcgtcacggtagtgaaagtcactgaaggtgtaggcctggcgcagggcaagctggccgttgcggccgccgtcccacagtgggctgagcaggctcagttccacaccctggtgcaccgtggggctggcgttggactcggcgacgatggcattgctggtggaggtttgcgcctgggtttcaacggtgagcagttcgtggcgcacttcggagcggtacagggccaggtcccattggccgagccaggcctcaccgcgcccgccgatctccagagtggtggcggtctggtttttcaggctcacgccctcccgtgccaggcctttggctggaccaccggtaaagtatttgttggaaccccagatcatcgaccacgcatgcggcggctcgaccgagcggctcaggttgccgtacacctgcaattgcggggtgaagtcatagcgcaggccgatgcgtggtgcgtagtcccagtcgtgctggctgagcggcgcctggccttcaggataggtgacctgggtttcgcgacgcgtgtagatcgccgccaggccggtggtcagccacaggtcaggcaccagctccaggtcgttgccgatatgcagcacggtgtcggaacccaggtagctgtagtcgcgggtcttggtgccgggggcgtaggttgctgtattgccagcgggcgtgcgcacgtattccgaagcgccgttgttgggcatcgcctgggtggtgcgcaggccgacagtggttttactgtcatggccaaacagcgtgtcctggcggatgtaattgagggtgctgctgatatcggtgtaggcgactttcaggcggttggtgccttcgcgcaggtccatcgggtagtcgtggtaggccagcccgacttcgacccgggcgttgtcgtccaaatgcaaggtggtcttgttggcgatccaggtggagcccggttgcaggcgcttggaatcacgggctgcgttgaggctgttggccgcacgcgggtcgtggctgatctggctgcgcgtgagcttgcctggggtgtcgttggtggtttcgcggtaacggaagtaaaagcgggtttccaggtccgggttgaagcggtagccgaagttggcggccacgcccttgccggtggcggcgctctggcgctggtagccgtcggattcggaatcagtgaggctgatgtagtagtcggcatcccccagcacctggcctgaactgatctcgcgctgggcataacctttgctgcccgcttcgtaacgcagttgcagcttgggcgcgtcgtagcccgtgcgggtcacgtagttgaccgcgccgcccaaggccagcgcgccctgatcaaaaccgttggcgccgcgcagcacttcgacttggctttgccacagcgggtctttcagctcatagggcgtgccgccggggccggtgagtggcaggccatcgaacatttcatataagccggaagcatgggaaccgggactacggttcaggcccgagccgcgaatcgagagtttcaccccttcgttgttggccgccttggcatacaccccggcctggtacttgaacacgtcttcgttggtgctcacccttccctgctgcacgctgttcatgtcgatatagttggtgccgccgggcacgctcttgagctgcgcctgggccacttcaccgtcgctggcttggctgctggtgacttcaaccggagccagttgcaggtcttcggcgtgcaccagtgagcttaaggtcagggcggcaaacaggagcggaggttggcgcagcagcatcgggcaggtccttggaattcggggggtacgtggtgggaagacaggggcgcccgccaggtcactccttattaacggaccagacccttcctacaccaacgtcggaccgagactattctctgcaggatggtggcagagcagtaggaagtggcgagcgcgcttgtcccgcgttgggctgcgaagcagccccaaaaacagcagccgaagagtgcctgactcaccgcattcttccttccagggtcgcttcgcaacccaacgcgggacaagcccgctcgccaccgatgcagtgttcgtctttaatgggagggtatcagccagatatggccggtttttcaaagaccttgagagggatggcttttaagcctgggaggtttgcgatttcaacctcccgaaaacgcatagattttttcagcagctcacatacagatcactttggggtcgctgtctgttcgaaattgcgaccaacctccccgcgtcgaatgtatcacttggttttgtatcccaggtaaggcagtcgcctgtacgttgacgctttggcctcctgggctgttttctgtgaaaaatctgaagctgatatgacaagtatggggcttatcgtccgtattggtcgcaaacacgtccaatccggactggtcttggcggaccgcagtcgtaaccgcgctggccatcgttgaaaacactactgcaagtgcgcctatcagtaatttcttcattggaaacgtctccgttcattgatcgaaatactgtgaaagccaaactgcagcacagtaacgtcaactgtagctgaaagagcccctgccattgggcgtggcttgaaaatatggccattagccgctatctatacgccctgcgtttaacccgttctgttacacctcgtgaaccacccgcgagcaacggccgagcatggacaggcgaaaaaccggctttcaaaccgagtagggcaagcgaacgtcaaatgagcgaaaagaaacagcaattcagaaatacgtgcatattttgcaaaggtaataaaacctcaaacgagcacattttcccccgttggttaaggcagttcatacccatcgaacggggaagcgacgataaaagctaccatcgcacactggtcacaaaacaacctattgggggtgcatcaacagaagttttcccaaaaaacaccagcaactcggtattgagtactcagaccaagaaagtttgtacaacttgcaataaccaatggatgagtagattagagacagaaatgatgtccctctatgaaaaactacatcgtcaatcgctcaccaccttatcgatggatgaccaacgagccctcagtacgtgggccattttactggcgataaaatgggacctcactgaagtcaacacttcagggtattcagaacgacacacgcatcatgtgttccagcacaagaccccgccacctaacacgaggatttggctgggctactgtgaagacggtcaagtggaaatcaggcataggacaacggttttgctcaaggccaaaccgacacaggcacatccgattaatgttcgatcaacagcgataatgctcggcaccttggtgttgcacattcttagccatgaaacgtccagttatccaataatagtggatgccaacaaacgcaacaaaaaaatggtcttgatatggcctacaacacaagaacttgtcatggatcgatcaatgctcgaaaaagtcacatccgaaaacctgaaatcaatgtctcacttcctaggtatgcagcacagctaccgacacgttgtatcgcttattgcctcactgccagaactttatgctcaaacataacgtaacctgacctgttgacatccgcccgctaggcctactttccagtttggcccaatgctcgcatcagctcctctgcttccgaccctggcggaaggcggaaaccgaacatttcatcagcggccagaatctcgcccaccgcgtcgagtaattgcgcctcggttggcgagtcacgcagcagcttgtgtgccgccagtaacaattcggcgcaaacgccttggacactcgccgcatcgatcacggcaaaaaggataaaacgcaaacgtatttcgcgatcagtgggccaaaccgttttttgcttacccatggtagaggcctcaagctttcggaaaaatccgaggctattgatggcttgagggtgtttcaagcatcaggaggcaagataggtcacttcctacagaagaaagggaaacaccgtaccaatcatcaaaggaagccaggctttattgcaccggcagaaagttcatcagcaataggctctgcgcgtaattgagaccgatgcgccggtagcgttcgtcaagcatctgggtcagcaagtcgagtcgcgctacgattttgccgaactccaccgcgaagctgaggttgctgccctcctccgatatctcgttggagaacaacagcagcacgccattggcatcctggcgcttgctcagcagccaggtggccttctcgatgttgcgtgcggcgttgctgacgaactgcgggttgatcgaatcggtgatgtagaactcggtgcgcccaccgtgggcggtcacgatcatgctgccgatggcgtagataaatgcgccgacgcggtcgcctttgaactccgcactcagggaataactcagcgccgccaggtcacgccgatcacccagggccggcagcgatcgccgctgctcgatggcctggcggatctcgcgcgcagcggtgaccgcatccggatagcccgactgacgccattggctggggttacgcaggtagagcttgctcatcagcagatacaggctttgcaggttgtcgcgcatgccaagcgtggccatgcggtcgacactggtctggaagaactcatcgggcttgccgttgctgaactgcttggcgatatcccgcccctgttgctggctgcaaccgccagcgcagagcatcaacacggcggccagcagcaagggctggcaacagcgcggaaggttgaaacgaagaaacgtgcgatccatcggcacccgatctgattcatctgcccacacgggaaatcggcagggctgggacaaggatagagcggagaaatctaaaaaagtgcagtggaccccggcagatagttgtaagcagagaccaccgggcaggtgaatcggcgcaatcgtgaaggattcgtttcagggcctatactgaaggcaacagcggcgtgtgttgttggcgcatttgctcataagcagctgtataggaggtgacggcaatgaaacatccaattcgggcgcaaatggttgttcagatgatttgcctgctttcggtggctcagcttttttgctgaaaacgtgtcaccggtgtcaaattcagccgtggttgcggcgctgggaggtattgtctgcaacctcctcagcaactggcccgcccccattggccgggccagaacgtgcaactacaacaagaccgtggccagcatgcctagagcccccaggcaaaacccgatcagggcaccccgcccgggtacttcatggaacagcgcccagatcaccacaggctccagcagcaataacgaggtgatggatacgactgtcaccacccagatatcaccgaccgcacgataccccagccagtaagcccccagcagacacagcccggcaaaacacatgaccaccaccggcatgatgaacgcctgccatgaaccgtcgccggcctgagccagcctggcggtgattacctcgctgtagattgcacaaaactcaccaacgaccatcaaccctagagcagaaactccgagtagttctttggacatatcaaaaactccttcgtattcaacgcactgtttttcaactcccagcgggcgatgccgttgccgaggttttcgttgcagcgatacgaagcagccttgaacaggcctgaattaccgaagtgcttttgcatgctcgtgtccttgaaaagggggtgaatcccagcgaccgtagaggacgcccggcctgatcatacgtttggtcaagcgctttgaacaacctgcgcagggcatccaaaattcacaagacgcctagtcgacactcggcctgttcaggctatgatcgccccctatgaaccagaaggctgactgcccatgcccgttgacctggaagccctctatcccaaactgatccacctgatgctggatacagtcttcgtcgtcgacggcgacaaccagattgtgttcgtgagcgatgcctgtgaggcactgctcggctacagcgccgatgaactggtgggcacacccatcacccactacatgcatcctgacgacctggcacgcacccgagcctccattgtccgggtcatgaacggccaaccccatgtcgacttccgtaatcgttatatccgcaaagatggcagcgtcgtgcacatcctgtgggcggcgttctggtccgaagaagtgggcgcgcgcatcggtgtcgcacgggacgtgaccgcactcacccaggccgaagaggagctgcgcttcctcgcccaccatgacccgctgacagccctcaccaaccgttcgctgttcaatgcccggctggatgacgccttgcataccgcacggcttcacaaccagcccctggcgctgctgttcctggacattaatgatttcaagggcatcaacgatgtgcatggccacgccatgggcgaccgcctgctgtgcgtgattgcacgacgactggagcgctgcgtacgcgaaagcgacctggtggcccggatgggcggggatgaattcaccgtactgatgaccgacatcccctcacaggatgcggtgaccggcaaggtcgcgcacttgctcgcggtaatggccgagccgctggggccggagtttggcggggtgaaaatgccgtcctgcagtatcggcgtggccttctatccacggaacgggctggatgccgacacgctgttgagtcacgcggatggggatatgtaccgggtgaaaaggcagcggtttgcgacggattgagaccgatcaacaccgcgcgcgccgattaaaagccaatgccccgacgtgtcggggcattggcttgtgtagtcatgggataatcaaccagaaacgaacatcttttcagaagtttcaactggcaaaagattcatcccaacgtggaatcattatttggcttggcgaagcacaagctccgtcaaacgagtcttgacccggaagcagaactcacgaatttgaaattgataagccggcatgaccatgtagttcaaatcaggacccaacgagtctttgacttccatgtacttagcggtcttggcagcaatggcctggtattgcgcctcgtatttatcgtacgacgctttgttgtacacccttagaacatccagctctttacggcattgctcagcgcgattctggttcaagtttgtttcagactcttcctgagctgcctcctgggagacatggattggggctacaggacgtgggttcgcaggtgcagcctcataccgtacagtgaaattttctggtggtgtcgaaggtgcggcttcagcgggtgcctcatggacgacggctggagggggagtctctttaggtttttctggagttttcgtagcgcatcccgagagagcaagacctaccactacaacgatgccacacattttattcatcggtttcaccaagaggtatttggggttggctgagtcgttaggttctgggtaaaagtcatcactcaatcaatgatagagcgtacattttctaccagactcaaggcgctcagccgctcttccttgagtgcgcaggtgagcaatagtagtaaaaaatcaaagagatgacgaggaaaagcttggcgggaagtgcacaaacccaatgggataatgactgtgcggctttgcttctctaagttcgacgacgcccacatcactcggatgcctgcacccggtaattgggcatggtcttcgttgtgaatactgccggtgtcggtgaggatctcggcttggagtcattcccatacttcgagagccggggttaggcgaatgccgaagtcggataggccggacagctcaagctgtgacgatggagggtatggcctgtccataagttaccttgagcttgaaatagtggcgcattgccggtattcatggcgacttcaaaaagtaaggacgctgatactcatgtcattcgtcaaagccggctcactcttcgtatgccttttgggcgctgcgtcgctcaacggatgcaccgtgggccctcaagcaacgtggaccaacctgggccccggtgggatagcaaccaaacgcagccaaatcgcctgctacacagacgcaaacatcatcgacgggaagcgagtggaaggcacattatgcgcgtttcctacgtccggattcctgagcgacggcgagccaaccgtaatcgcaagaatgggctatgggcagcaatacactttggaattcagcaagacgcttgcggggtttgaactaccattcggcgacaagaagggagttctgaaatgcgaacctatgaagactgagcctggcaggacaatacctgagagcttttgcactctcacggtcaacggccagaaattggtcagcgctaagatactgtttggtggcatgtgacaaccacccgtgccgcactcacctgcggcacacctaaatctacacagtcttcagtagcccgaagcggcttacgctccccactgctggttataggccgcgacgtgctcaggaaagacatcaccgtatggtggatactcgattcctagaacgctcaactctattgcgtcttccccgcaatcaaacgagtagtccgcaatgcacacaccggcagcccgaatcgcctctccgcccacaatacgcactgtaaaattaaaatgtctctgatcacgctgagcaaaggctctgacttgctcctggataatggaatatccaggagcaggaacaaatacgccgaacgccacccccatgggcggatcgccgagctctaaatcggaccaaccgataggctgcccattactgaaagcttcgaatcgcagcatggaaatgacctatcaggcactgctaaatttcccgaagaataacgcatcagcttgatagcgggtattcaggaccgcgggcgtggtcaccactctgcatcatggttgcgagtgcccatgaactggtggcaaggaagtatgctgcggtaccaacatctcccaagctgatgtaaaaaagtactattgcccttgcaagccttcactggattcagaccaacacatgcagatcatccgcactggaacggttttaactggcgaatacgctggttggacaatagaaattcaggatgaccgcgcaggtgaaacgggtggttattacctgttcatggtgcaggacgaatccaatggtttcgattcttggtttgagcgcatagagcagctgcagcaacaaatttcagaactcgacgttcgctggaattagcgtctcactcatgcgctttccttttatccctccccttcaacgtcagccgctatagcggcaagacccaaggtggtatcggaaatcatcgatatcggcgacgccagcctactccagggacacagcgagcaggagatcaccaaacgggtttacagaaggattggcgccactgccaaaccatcaaaataggcaaagtttcggaacgcctatcaaaaaccggcgttacctacccaaaccccagaaacacaaaagccccgctagtgcggggcttttgtttgaatcttggcgggaaaccagggattcgaaccctggagacgctattaacgtccgccggttttcaagaccggtgcattcaaccactctgccaatttcccttgtgcatcacaggattatagtagcctatcccgtctcagcgggcgccataatacccgaatgaaacacactgtcaaactctcgccatagcttgttacagagcgtctgttatgatctttgcgactgaacgtttcaaaactgaaggagtgtcgccatgcgcgaacagaattacgcagtgaatggtaacgcgcaggctgagcagcttgaagtcagccgcgtgttgcgcaacacctatggcctgctcgcccttaccctcgcattcagcggcgtgatggcgttcgtggcccagcagatgcgcgtcggctacccgaatatctttgtggtgctgatcggcttctatggcctgttcttcctcaccaacaaactgcgcgactctgcgtggggcctggtgtcggcatttgccctgaccggcttcatgggctttatcctcggcccgatcctcaaccgttacctcggcatggccggcggcgcggaagtggtcagctcggcgtttgccatgacggcgctggtgtttggtggtctgtcggcctacgtgctgatcacccgcaaggacatgagcttcctgggcggcttcatcaccgctggtttcttcgtgttgctggcggctgtggttgcgagcatgttcttccagatcagcgggctgcaactggcgatcagcgcaggtttcgtgctgttctcctcggtgtgcatcctgttccagaccagcgcgatcatccacggtggtgagcgtaactacatcatggcgaccatcagcctgtatgtgtcgatctacaacctgttcatcagcctgttgcagatcttcggcatcatgagccgcgacgactgattactggctgcaataaaaaacgccccgtatcgaaagatgcggggcatttttgttttcagaaggtcagtactggttgggttccatttccagctcgaccttgaagcgctccagaatatcacgctggatgcgccgggccaggttggcaatgtcgtgccccgaggcaccgccatagttgaccagcaccagcgcctgcagcttgtgcacgccggcatctccttcgcggaagcccttccagccggccttgtcgatcagccagccggctgcgagcttcatctgcccgtcaggttgcgggtaagccaccaggtccggataaagtgcctgcaactcggccgccagcacctgggacaccaacgggttcttgaagaagctgccggcattgccaagttctgccgggtccggcagtttttcgcggcggatgctgcagatggcgcggctgacgtcgctcggcgttgcctcgctgatcccctgcgccgccaggcgctgctggacggggccgtagtcgagtttcaagtgactggcgcggctgagggcgaagcgtacgcgcaggatcagccagcgtccggtctcgtgcttgaacaggctgtcacggtaggcaaagttgcattcctccaggctgaagtcgcgcagttcgccggagtggcgatccagggcggtcaggccggcgaatacatccttgatctcgacaccgtaggcaccgatgttctgcatgggcgcggctccgacggtgccggggatcaggctgaggttttccaggccgcaaaagccctgttccagggtccacagcacaaaggggtgccaggcttctcccgcctcggcctcgaccaccacgtgcaggccatcgtcgtgcagcacgcggatgccttgggtagccatgcgcagcaccagcgccggaatgtcctgggtcagcaacaggttgctaccaccgccgatcaccagcagcggcacattgtgtgcggtggcatatgccagggcctcgcgcacatcgctgtcgctgtgggcctcggcgaacagctgggcacgtacgtcgatgccgaaactgttgaacggcttgagcgatacctgcgcaagcacctgcaaggtcataaccgccccttcaattcgatcaccaataaatcacaggcctgctcgatcaggtccaggacccgttcgaagccttgttcaccctcgtagtacgggtctggcacttcgtccacttcggcatcgtaacggcgcaggaacaggtccagctccgccttgccctgccccggctgcatggccttgaggttgcgcagattgctgtggtccatggccaggatcaggtcatagcgcgcaaagtcggcgcgggacacctgctgggcacgctgggccgacagatcgtagccgcgcgccaacgccgcacgctggctgcgctggtccggcgggttgccgatatgccactcaccggtgccggcggacgccacatcgacctgccccgccagccccgcttcgcgcagtttgtggcgcagcacgccttctgcggtgggcgagcggcagatattgcccaggcagacaaacaggacctccatcaggcccccagcaggcgacggacgcgctcaaggtcttccggggtgtcgacaccggccggtggcgcttccagcgcatcgcccacatggatgcgcacgccgtgccagagcgcccgcagttgctccagggattcggtattttccagccagcacgggccccaactgacgaagtcatgcaggaaacccgcgcggtaggcgtagatgccgatatggcgacggtaaggcacgccttccggcaacacgtccggttgcttggcgaaggcgtcacgtgcccacggtagggtcgaacggctgaacgtcagcgccagaccgttgatatcgctgaccaccttgaccacattcgggttgaacagggtctcgatgtcttcgatcggctcggccagcgtcgccatgcgcgcttcgccatgggcggccaggttggcggccacctggtcgataacaccgggtgggatcaacggttcgtcaccttgcacgttgaccacgatggcgtcgggcgccaggccgagctgtgtggcgacttcggccaggcggtcggtgccggagttgtggtcttcgcgggtcagcaccgcctcagcgccaaagcctttgcaggcctcgatgatgcgcgggtcatcggtggccaccaccacacgctcggcgctgcttttgcaagcctgttcccacaccagctggatcatcggcttgttgccgatcagttgcagcggtttgcccggcaggcgggtcgacgcataacgggagggaatgacaacggtaaaggcggtggtcatttatccaggcgctcatcggtggtcagggtacgggcttcgctttccagcatcaccgggatgccatcacggatcgggtacgccaggccggcgcctttgctgatcagctcggttttgtcggcgctgagcttgagcgggcccttgcagatcgggcaagcgaggatgtcgagcagtttggtgtccatgagtgtttcctgaaaaaagcggtttaaggcaaaagacgggcgggcaacaggcgcatcagctgcgtgtcgaaccaggcgacgaacgccggcgacggcagcgcatccaccgcaaggtaccaccagtcgggctgggcaaaggcgcggcacttcaccgcgtccttttcggtcatgaccagcggcaatgacggcgtaaaattcaggacctcggcactgtagggcgcgtggtcggcaaatgcatggggtatcggctgccagtgtagcgtttcaagggtgttgaagaaacgttgcgggttgccgatgccggcgaccgcatgcacctgctggcccggcgcaaaatgatccaccggccggcgctcgccggtttgcaggttgaccagtgcggtgggctgcaaacgaaaggcaaagccgtcctcgcggtcgctggcggcgccgttgtacagcaacgcatcgacactctgcaggcgctccaccggttcgcgcaacggccccgccggcaggcagcgacggttgcccaggccacgggcggcgtcgatcagcaccagttcaaggtcacgggccaggcggtaatgctgcaggccgtcatcggagaggatcaggtccagggtttcactggccagcagcgcctggaccgcacggctgcgatcggggtcgatcatcagcggtacgccgcagcgctgcacgatcaacaaaggctcgtcacccgccacctcggcgctgtggctggcctcgacacgccacggcaactgcggtggcttggcgccataaccgcgactgaccacgccgacgcgcaagccgctgcgttgacaatgttcgataagccacaggatcaacggcgtcttgccggtaccacccacggtgatattaccgaccaccaccaccggcaccggcgattgatagatctcgccctcacccgccaggaagcgtgcgcgcttgcgctgcaccacccggcgatacaaagactccagcggccgcaacaacgcgagtgccggatggccctcataccaggccttgagcaaacgatcggacatggccatcagggttggctcgccgcctcgacggtgctcatgcgcaagtggctgaaaccgagcttgccggccgcgtccatcgcagtgatcacggcctggtgctgggtcttgccatcagcgctgatggacagcggcaactgcgtgtcgccgccggactctttctgcaaggcctccatcaggctggcgaggtcgtttttctccagcaactggttgttcaccgaaaacaccccgtcggcgctgatggcgatgtccagttgcttgacttgctggtcttcggccggcgaaccgctcacggcttccggcaggtcgacgcgcagttcggtttgccgggtgaaggtggtggtgacgacaaaaaacagcagcaggataaacaccacgtcgatcagcgacgcgaggttgatatcgacattttcccgttgcttgcggcgaaatttcacgctttgcccccaaccaggtccacatcgcggtcgccctgcaccacttccaccaacttgatggcttcctgctccatgcccaccaccagctcatcgatgcgacgttgcaggaaccggtggaagaacaccgaaggaatacccaccatcaggccggcggccgtagtgatcagtgccttggagataccaccggccagcacggccgcattggtggtcatgccggagcccatgaacgaactgaaaatgtcgatcatgcccaacaccgtgccgagcaagccgagcaatggcgccatggcggcgatggtgccgagggcgttgatgtagcgctccagttcatggatgacgcgggcggcggcctcttcgatgcactccttcatgatctcgcgaccatgcttggagttggccaggcctgcggcaaggatctcacccaacggggagttggcgcgcagttccttgagtttttccttgtccagttgcttgttcttgatccagccccagacctgccccagcagatgctcgggggtcacgcggctggcgcgcagggtccacaggcgttcggcgacgatgccgagtgcggcgatagagctcatgatgatcggcaacatcatccagccgccggatttgaccaattcccacacagtgaatgtcccctcgaaaaagtgcgccactttaccatataggtgcgtcagccacagaccccatcggccgaggccttgaccccctagggtaagcgctcgcgccagaacctgcgttgactgcgcgcaacgaccggtggcgcgaatgctcccagttgcacacgcacggccccctgctctgcgctgtcatacacctggctgcccaaccgttgataacgctccatcacctgcggatgcgggtggccgaacgcattgccgcgcccccgcgagatcagcacattgcgcggagagagccgctcgacaaacgcccaggacgaagagctgcgactgccatggtggggcgcctgcagccacgcggtgggcaccgccagggacgaagcgagcatggcctgttcggcgtcgcggtcgatgtcgccggtcagtaacaggcgctcgccattggcctgcacctgcaagacgcaggactttgcattgccactgatggcgccaggccactgccacagttcgaacgttaccccgtcccaggtccatcgttcgccactgacgcagggttgcgtaccgataaacgccggcaacccatcggtttctccgcccaccacacgcttgatcggtatgcccttggcaattgccgccgcaccaccggcatgatccgcgtcggcgtggctgagcagcatgaggtccaatgccccgaccccgagctttcgcaacgacggcagcaccacccgcgcgccgagatcaaaggttccagtgcgcggtccggcgtcgtaaagcaatgcatgatggcgcgtgcgcagaatcagcgactgcccttgcccgacgtccaactgcaccacctccacctgcccgtggggcacctgctctcgcgggggaaacaccgccagtagcaacatcggccagcccagcgtgcgaaagggcacgccgttgggcagcagaagcaacacggcccccaacaggctcaccagccaataccccaaaggtacttgcgccgggatccaggccggcatgtgtccggcgagccacgccagccccttgaacaagccatccagcgcgccgcccgccagccacagaagaccttcgccaatatatggcaatggcagtaatgcagtccccgatagcgccagcggcaacaccaccaggctgatccatggcacagccacgaggttggccagcggtgcgctcaggctgatgggcagtcccagcacccacaacaccggaaacaatccaatggcaatcagccactgaggtcgggtccatgcctgccacaggctccacggccccaaccgcccaccaaacgccagaatcagcactgccaccgccgcaaacgacagccagaaccctggctgcaaactggccaacggttccagcaccaacacaccattgagtgccagcaacaacggccaccataggcccagatgccggaagcgcagccgccacaccaacaccaacccgaccatcacgcaggcccgctgtactggcacgccaaaccctgcgagccagccgtagcccaacgcagcgctgaacgccaggccacacgcccagggcaaccacggccaggttcgcggccagcaaccgtagcgggccaagccggcgatcagcccatagatcaaacccgccagcaaaccgatgtgctggccggagatgaccagcagatgcacggtgcccgtatcctgcaacacttgccaatcggcagtggccagccctgaaccatcccccagcaccagggcaaccaggccggcttcccgaccttgggcgtccaccgccataaggcgctgacgcacgctgtcgcgccaggcattgcgggccggcgccagacgctcgccgtccttgaccgagcccgtggcgccgatgcgttgggccaacagccaggcttcctgatcaaacccgtggaaattcagcaacccggccggacgtttgagggtaaccgccaggcgccaacgttcaccgctgcgcaccggcggcccgccacgccaggacacgcggatgcgtttgggtaagcgggcatttcgcgaccgactatcggccagttcgaagcgcacaccctcgcccgtctgtcgcggcaacccgatcacccgcccctccagccagcgcgtctggccgtccagtgcaggtatcaggcgatcatccaatgcccactgtgcgctgaggcatgcccaactcagccccagcaggaaaaacgccagtgggtaggtacgaaacggcaacaacatcaacgccagcaccggcgtggcaatcagccattccataggcggcaacaccggcaaaaagcgcagggccagcaaccccagcgcaaacgcgcacatccctgtcttcatgaaccatccttttcaagtgatccactcagtcttagccggatgcccagggcggcctatgatgttttgtcacaaagtctgaattttctgtttatagaatgcgggcatacttgcccctcgaactgacctggaccccttatgccccggcgcttattcaaacggtacatgcccgatcccacgagtatcagggaacataagtcattacagtttctcggcacgttgctgcatgacccgaacctctggcacctgaaccggcactcggtcgcacgcgcaatggccgtgggtttgttcgccgcgtttatcccaatcccgcttcagatgctgttggcggcagtcctggcgatcaccgtgcgcggcaatatgcccatcgctatcagcctggtgtggctgaccaacccgattaccatgccggtggtgtttatctgcacctacatgaccggcgcctggctgatgaacgtgccaccgcgcagcctgcccgacgacctcacctggaaatggatcagcggccaactcagcaccttgtggcagccgttcctgctgggttcagtggtgttggggctggtgctgggcgccctcgcctattgcctgaccatgggctactggcgctggtgggtggcccaccagtggaaaaagcgcaaacagcgccgcgcttagcaggcccgcaagcgcaggtgcacgcgcaggccttgcccggtattttccgcccacaggctgccgtcctggcgctgcacggcgttgcgggcgatgctcaggcccagcccgaagccgccatcgccggggcgtgaaccgtcaaggcgggtaaaaggcgcgaagatccgctccaggtccccgtcatcgatcccgccgccctggtcctccagccagacatgccaataatcaccttcgcgacgcccgtccaggctgaccacgccgcccgacggtgagtggcggatagcgttgcgcaagatgttttccagggcctgcgccaacgcattcaggttgcctcgcacccagcattccgcccccaacaggcatggcagccgcgaccccggccagtcgctctcatagcaggcgttttcacgcaacatgtcccacagcgcctgaagctggatagcttcctggggcagcggcgcgcgttcggtgtcgagccaggccagttgcaggctgtcttccaccaggcgctgcatcgcgtcgatttcacggccgagccgctcgcgcagttgcgccaggtcttgctcactgtcacaggccactcgcaggcgactcagcggggtgcgcagttcatgggacatgtcccgcagcaactgttgctgcaacaccacggtgccctgcaaacgctcggacatatggtcgaacgcacgccccagttcgcccagctcatcctggcgactggtggcgtcgtgggacaaacgcgtgttcaactgatcggcacgccaggcattggcctgctcacgcagttgattgaggggcatgatcagcagccgatacaacccaatacacagcaaaagggtaaacaggccgggaatcaccccgttggtcaccacccgccagaacagttgatagcgccccggcatgaagcgttgcggcaactcgatcaccagcgaccccgcatgggggtcgcccggaaacgggatcttcagccacggcaggcctttgacatgccggctcaccggccaatccaggccacgcagaaaggtcaggcgctggctttcgttgtcgctcagcgggatgctgctcaacgattgcaggtcattgccgatcacacctatccaggtgctttcgcgcttgcccatcgcctgcagccaggcgtcgacgccggcattgccgccgcgattccacgcctgttcagcaccgaccgcgtacccactcaaggtgattcgcgccgcatcggacaggtaggcgttcttctgctccatgtagcggccccaggaccagctgagccagatcatcaacaagcaaaaggcgatcagcaggcaggcgagtttccagaataacgagtgcctgcccggcagccttttcaacgggcgttcaaaggccgtcatcgtgaccgctcagcacatagcccttgccccacacggtgcgcacttcgcgctcggtgtagccgatggccttgagcttgcggcggatctggctgatatgcatgtcgaggctgcggtcatggggcgcataaccgcgttgcagcacatgctggtacaagaaaggtttgctgaggacttcttcactgttgcggtgcagggtttccagcagccggtattcgctgcgggtcaggccggcccaatggtccaggtggaaaacatcgcacagctcatcgtcaaagcgcagcgcgcgggcatcgtcgcacaccggtgccggaatcggcaacggacgccggtcgagggccactcgacgcaggatagcttcgatgcgcacgcgcagctcgatcatgctgaacggcttgggcaggtagtcatcggctcccaggcgaaaaccgctgacgcgatcggcttcagcacccagtgcggacatcaggatcaccgggatcgaatggctctggcgcagatgagtgaggatcgacaggccatccatgcccggcaacaggatgtccatcaacaccacgtcaaaggcctgctcgcgcgccatctgcaggccctgctggccattctggcaccaggtcacgtggaaaccacagcggcccaggtgctcatggacataagcgcccagcacggggtcatcttcaatggtcaggatactgggtaggccaattgctgcgggattcattagtatctgcaagtcattctcaatggctgattattcaagattaccccgccacaggcaatcgccaccgggcgccgaatggcgcgaagattgccgtatgtcattaatttgcaagattccacgctgcgcaaatggctacactgcgcaggtggcgcgggccggatgcccgtgtgaatcatcgatatcaatgtggtagcaggagagtggcgtgctgacaagaatggggataaaaggccgcgtactgttgctgaccttattaccgaccagcctgatggcttcgttgctgggcggctatttcacctggatgcagttgtcggaactgcagacccagttgctgcaacgtggcgaaatgatcgccgagcagttggcgccactggtggcgcccgccttgagtgcacgcaacaccgacctgctggagcgcatcgccacccagtccctggagcagccggacgtgcgcactgtgtcgttcctcagcccggaccgtgcgaccctcgcccacgccggcccgaccatgctcaaccaggcccccatcggcaacagctcacacctgttgcaacgcaccggcaatgacgccacgcgctacctgctgccggtgtttggccgccatcgcaacctcgccggcgacctgatcccggatgaagccgaccgcctgctgggctgggtcgaggtggaactgtcccacaatggcatgttgctgcgtggctaccgcagcctgttcgccagcctgctgctgatcgccatcggcctgatctgcaccgcggcactggccctgcgcatcagccgcaccatcaacgcgccaatcggccagatcaagcaagccgtggcccagctcaaggacggcaacctggaaacccgcctgccgcccctgggcagccaggaactggaccagctcgcctctggcatcaaccgcatggccgagaccctgcagaacgcccaggaagaactgcaacacagcatcgaccaggccaccgaagacgtacgccagaacctggaaaccatcgagatccagaacatcgagctggacctggcacgcaaggaggccctggaggccagccgcatcaagtcggagttcctggccaacatgagccatgagatccgcacgccgctcaacggcatcctcggctttacccatttattgcaaaagagcgagctgaccccgcgtcaactcgactacctgggcaccatcgaaaaatccgccgacaacctgctgggcattatcaacgagatcctcgacttctcgaaaatcgaagccggcaaactggtcctcgacagcatcccgttcaacctgcgggacttgctgcaagacaccctgaccatcctcgcccccgccgcccatgccaagcagctcgaattggtcagcctggtctaccgtgacacgccgctggcgctggtgggcgacccgttgcgcctcaagcaaattctcaccaacctgatcagcaacgcgatcaagttcacccgcgaaggcaccatcgtggcccgggcgatgatcgaggacgagcaggaagacagcgtgcaattgcgcatcagcgtgcaggacaccggtatcggcctgtccagccaggacgtacgcgccctgttccaggccttcagccaggctgacaattcactgtcgcgccaacccggcggtacgggcttgggcctggtgatctccaagcgcctgatcgaacagatgggcggcgaaatcggcgtcgacagcacacccggcgaaggctctgagttctggatcagcctgaacctgcccaagacccgcgacgacgtggaggacctgccgtccgcgcctctgctgggccatcgtgtcgccttgctggaaaaccacgaactggcacgccaggcgctgcaacaccaactggaagactgcggcctggaagtcacgccgttcaccagcctggaaagcctgaccaacggcatcaccagtgcccaccagaccgagcaggccattgaccttgcggtgctcggcgtcacggccaacgatatcccgcccgagcgcctcaaccaacacctgtgggacctcgaacacctgggctgcaaagtgctggtgctgtgccccaccaccgaacagatgctgttcaaccagtcggtgcccaaccccaacagtcaattgcaggccaagccggcgtgcacgcgcaaactgcgccgtgccttgtccgacctgatcagcccacgcccgacacgcagcgaacccggcgaaccgttgtccagccgggcgccacgcgtcctgtgcgtggatgacaatccggcgaacctgttgctggtccagaccctgctggaagacatgggcgcccgggtgcatgccgtggaaagcggttatgcagccgtcgacgcagtgaagcaggacaccttcgaccttgtgctgatggatgtgcaaatgcccggcatggatggccgccaaagcaccgaggcgatccgccagtgggaaagcgaacgcagcggcacgccattgccggtagtcgccctcaccgcccacgccatggccaatgaaaaacgcgccttgctgcaaagcggcatggacgactacctgaccaagcccatcagcgaacgccaactggcccaggtggtgctgaaatggaccggcctggccctgcgcaatcagggtccggagcgcacgaccgacaacctcggccctggcgtgaaactgccggtgctcgaccacgaggaagggctgcgcctggcggccggcaaagcggacctggcggcggatatgctcgcgatgttgctggcttccctggaggccgaccgcctggccatcacccaggcccgtgaggccaatgacaacaacgccctgatcgaacgcgtgcatcgcctgcacggcgcaacgcgttactgcggcgtaccgcaactgcgggcatgctgccagcgcgccgaaaccctgctcaagcaggacgacgccaaggccatgcatgcgctggacgaactggacatggcgattgcccggctggccagtgaggcgcgggtcagcgcctgaagctactttgacgccgatcaattgtgggagggggcttgcccccgatagcgtcgcatcagtcgaagcatctgtagctgacacaccctaatcgggggcaagccccctcccacagttgtccagcatttccaacagattaattgcggggagccttttgatgcgcgtgattcttttcagcagccaaacctacgaccgcgacagctttctcggcgaaccattgccgcctggcctggagctgcaattccaacccgcacggctcaacctcgacaccgtggctttggccgaacatcacgaagtggtctgcgcctttatcaacgatgacctcagcgccccggtgctggaacagttggccaagggcggcacacggttgatcgccctgcgctcggcgggctacaaccatgtggacctgcccgtcgccaagcgcctgggcctgaccatcgtgcgcgtgccggcctattcgccccatgcggtggccgaacacgcggtcgcgctgattctcgccctcaaccgtcgcctgcaccgcgcctacaaccgcacccgcgacggcgatttcagcctgcatggcctcaccggtttcgacctggtcggcaagaccgtcggcgtggtcggcaccgggcagatcggcgccaccttcgccaaaatcatggccggcttcggttgccagttgctcgcctacgaccccttccccaacccgcaggtacaggccttgggtgcacgctacgtgagcctgcccgaactgttggcccaggcgcagatcatcagcctgcactgcccgttgacggccgacagcaaacacctggtcaacgcccgttccctggcgcagatgcaaaccggtgcgatgctgatcaacaccggtcgcggtggcctggtcgacaccccagcgctgatcgaggcgctcaaggacggccagctcggctaccttgggctggatgtgtatgaggaagaagcgcagttgtttttcgaggaccgctccgacctgcccttgcaggacgacgtacttgcacgcctgctgaccttccccaacgtgatcattaccgcgcaccaggcgtttctcacccgcgaggccctggccgccatcgccggcaccacgttggccaacattgccgcgtgggccgatggccgggcacagaacctcgtcgaaggatgatcagcggtcacataccaggctcatgatgagccagcacccgtgataggatgccgcgcctatttggaggatccatggccgaacacgatttccgcttcagtttgctgagcccgcaacacaccctgatcgaatgccgcgccctggtgccgggccgttaccaggtcaccggcaacggtggttcgatcaagcatggcgacgtgctgatcgtctccctgcgcggcagtaaaaccctgtcgatgcgcctcactgtcgaaggtgacgcgcgctactccatccgcccggcaggccaatgggtcgccatggcccaggggccgaagttcggcgagttggagattcacacctggaaggtcaactgcgacagctgcgacgccgtgttggacttcgagtttgcagtggaaaccaagctgagcaaagagccactgcaacccgccgccaatgcgcggatcgccgagttgggctgggccagcgagggcgacaagcaccgctgcccgaaatgccagaaggctgcgcaatgagaggcctgttgctgcttgccgccctcggggcgggcctgaccggctgcgccggcgacgcggtcaagctccagcaggatcacagctacgtagtggaatggattggtgagcggccgctgatggactacgcgcacctgaccgtcaccctcggcgccgatggccgcgcctacggcaatggcggctgcaaccattggttcgcgccttacaccgtcgagggcaaaaagctcagcttcggccagatcggcagcacccgcaagctctgcgccgaagccttgatggagcaggaacaccgcttcttccaggccctgcaaggcgtacagcgctgggatatctcgccgatcgagcagacgcgcttctggccggccgagggcaagccgatccgcctgtggctcgaagaaggctgataccgccgatcggtaggttggtgggatccatatgtgggagggggcttgcccccgatggcggtgtaacagtcaactgatggagtgactgacacacagctatcgggggcaagccccctcccacatttgattccgggtagcccctagccgcgcaaggccttgagcttggccagcacgccttgcgccgtctgctcgcccatcaacgtttcgcgcaccttgcccttgtcatcgatgatgtaggtcaccggtagcgcttcactgcgtggaatatcgaaaatctcttccgggttctgcgccagcaccgtgaacttgatgcccagcttgtcgctggcggctttcagctcttcgccctgcacattgtcgaagttgaccccgaacacacccacattctgcgccttcagctgtgcggccagtgcgttgagctcagggatttccgtgcggcacgggccacaccattcggcccagtaattgaccaccagccactgcttgtccaagcgttcggacgctaccttctggccatattggtcaacgccgtaatcgttaccgcagccgctgagcagcagggttgtgatgatcgccaatgcaccgatcagtcgcctagtcatggggtaatccttcgcaaaaatgaacgttggctgcggcctatcgcctcttacggtttaaggacaggtcgctgcgcgggtagaatacccgccaccttacgcaagatgcgacccgcacatgaccgatctgacgctttatcacaacccgcgctgctcgaaatcccgcggtgcgctgcaactgctggaagcccgtggcctcacccccaccgtcgtacactacctggaaaccccgctggatgccgcgcaactcaaggcgctgctcggcaaactgggtatcagcgcgcgccaactgctgcgcagcggtgaagatgaatacaaggcgctcaacctggctgacgccagcctcagcgaagcccagttgatcgccgccattgccgatcacccgaagctgatggaacgcccgatcctggaaaccgccgacaaagccatcatcggccgtccgccggaaaacgtactggagatcctgccgtgacgccgccgtatgtgctggtgctgtattacagccgcaacggctcggtgagcgaaatggcccggcagattgcccgaggcatcgagcaaggcgggatggaggcgcgcttgcgcaccgtgccggcgatctccaccgagtgcgaagcggtggcaccgagcattccggatgaaggcgcgttgtatgccagcctcgacgacctgaaacactgctccggcctggccctgggcagcccgacccgcttcggcaatatggcggcgccgctcaagtacttcatcgacggcaccagcaacctgtggctcaccggcgccctcgtcggcaagcccgcgggtgtgtttacctccaccgccagcctgcacggcggccaggaaaccacgctgatgtcgatgctgctgccgttgctgcaccacggcatgctgatcaccggcctgccctacagcgaacaggccttgctcgatacccagggcggcggcacgccgtatggcgccagccaccacgccgggcctgacggcaagcgcatgctcgaccagcacgagatcgccctgtgtcgcgccttgggcctgcgcctggcgaacaccgccaccttgctggagggcggtcgtggccaggaagcctaaggtcctgccgccccaggcgtggttggagccacgggtcaaggtggctcgcgcactcagcctgctggcgttttttggcctggtcggtttgctctgcgtgtattacctgttcgtcgccgacctgcacggcgcacggccgtgggtgatcctgctgatcgaactggtgccgctgctggtgctgacgcccggcatgctgctgggcagcgcgcgcggccattcgtggatgtgctttgtggtgaacctgtatttcatcaagggcgcgctggcggcgtatgacccgaaccggcagtggttcggggtgctggaaatgctggcgagcctggcggtgttttgtacggcgttgttgtatgtgcgctggcggcatcagttgaaccgacagctggcagcggcctgaagtccctcatcgggggcaagccccctcccacactgttaccgcgccgcctatccaatgtgggagggggcttgcccccgatggcaccaccccggcctcaatggttgacggtgtacgccaacatcatcgacaactggcacatcggccgcccgctctcggcgtgccactgattgaacgcaccctgcaccgtcgccaggtcgcgcaggctggtcggcgccttatcgacgatcttctgcgcgttcaacgccgccaccacgtcatcactcggcacaaaggtgtccttgccgaccatgcgcaaaaagcgcggcgcggacagcccgccaagctggtggccgtgcttgctcaggtacttccacagcccgacgatgtcggtcaccggccaatcggcgatgaacgcgccaaagctgcccttctcctgctggatatcgaggatcatctgcgcgttgcgcggcacgctcttgagcttgcccaggtggcggatgatgctggtgtcctgcatcagccgctccaggtgctcggcccccatcagcactaccttttccggatcgaagccgaaaaacaccttttcgaacgccggccacttggcgtccaccacactgtgcttcaagcccgcacgaaacacgcgcagcgccagggtcgacaggtagcgatcatcactgatcttgcgcaattgcgctggggtcttgggtgcaggcagatgggcttccagctcggccgcagaaccgaagcgattcagacaatattcgtgcagccacttgtaatcgcgcatgccctctcctggcaattgaattgaaaacggcgcccgcgagcgccgtgtgtcagagccttgaagggactcagaggttcacaacattgacgaagcgcgacgcggcggtttcatcaattttcaggctggtgaagtcaaacaggttgcggtcggccaattgcgaagggatcacgttctgcaggctgcggaagatgctttcggtacggcccggggtcttgcgttcccagtccagcagcatttccttgaccacctggcgttgcagattctcctgggaaccacacaggttgcacgggatgatcgggaattgcttgaagtcggagtaggcctggatgtctttctcgttgcaatacgccagcgggcggatcaccacgttgcgcccgtcatcggcacgcagcttgggcggcatggccttgagcgagccgttgaagaacatattgaggaagaaggtctcgacgatgtcgtcgcgatggtgacccagggccattttggtcgcgccgatttcatcggcgaaggtgtatagcgtgccacggcgcaggcgtgagcacagcgagcaggtggtcttgccttccggaatcagttccttgaccaccgaataggtgtctttctcaacaatgtggtactcgatgcccagctccttgaggtaggccggcagcacgtgctcgggaaaacccggttgtttctggtccatgttgacggcaacgatctcgaacttgatcggcgcgaccttttgcaggtgcagcagcacgtcgagcatggtgtagctgtctttgccgccggagaggcagaccatgaccttgtcgccgtcctcgatcatattgaaatcggcgaccgcttcaccagccaggcgacgcaggcgtttttgcagtttgttctggttgaccgtaagagtgcccatggcgcttggatccgctagaggtgtgtgacgaaaagccgagtattttaccggtaagaatcaccgagttccattgcgggagggggcttgcccccgattgcggcgtctcagcgactcattgatagctgacacaacgccatcgggggcaagccccctcccactatgatcagcgtccagtcaaaagacctcagcgcgattaaccccaacgtttacagcgcaatttgctctaaaggccctacagttattcaggctatcccttcctatactgcgactagaggtcgcacagctatccaggacctttgaggccatttggcccgtgggcgctccgatggggggcgatggcaataacgacaggagtgactggcatgatccatcatgtcgtggggctttttacccatcccgaccaggaatggcgggaaatccgtggcgataaagaagaaagcatcggccacatgtacctcacccataccttgattcttgcggcgattcccgccgtatccgcgtttatcggcaccacccaggtcggctgggtcatcggcaaccgcgcgccggtgatgctgacccaggaaagcgcattgtggatgaccctgatgtcctacgccgcgatgctcggtggcgtggcggtgatgggcgcgttcattcactggatggcgcgcacctacgacgccaatcccagcatggcgcgctgtgtggcgtttgccacctacaccgccacaccgctgttcattggcgggctggcggcgctctatccacacatgtggctgggcatggtggtgggcacggcggccatctgttacacggtgtacctgctatacgttggcgtgccgacctttatgaacatcgatccggatgaaggcttcctgttttccagttccatactggcggtaggattggtggtactggtagcgatcatggcctttaccgtgatcgtctggggcctgggcgtaggtcccatctacaccaactgagcggaaaaaaacccaggcaaagccaccgcaaggtggctttgtgcatcatgcatgaccattcggcgcctgacagattcggaaacacccagctttgcggcatactggacatctctggagatatgtacagcatgcccgagcaactcaatacccgcgtcgaagattgtttcctgctagccgaatcctttttcaaacgaagcttcaaacgccctcaggtcagcctcaagctgcggggccagaaggccggtgtcgcgcatttgcacgagaacctgctgcgcttcaacccacagctgtaccgtgaaaacagccaacatttcctgaagcagaccgtcgcccatgaagtggcgcacctgattgcccaccaattgtttggcgaacgcatccagccccacggcgaggaatggcaattgatcatgcgcggggtctacgaactgccgccggaccgttgccacacctatgccgtgaagcgccgccaggtcactcgctatatctacaagtgcccgtgcgcagacagtgactttccgttttcgtcacagcgccatgggatggtcgcccagggtcgaaggtatttgtgtcggcggtgccggcagaccttggtgtttaccggcgaaacccgggtggagtgagggcctcatcgggggcaagccccctcccacatagtgaccgcgccgccgacccagtgtgggagggagcttgctcccgatggcgccggtccagtcacccgactaccttggcccgccgcaaagcctctatccgctgaacactgaaccccaactccgccagcacctcatcactgtgcgcccccacggcggcgccaatatgcctgggctcaggcagcccctcggagaactttagcgggcacgccaattgcgcctgggtcgaaccatcgccccgtggcacctggctgaccagttgccgcgctttaagctgcggatgctccaccgcttcactcaggctcaacaccggctccacacacgcatccaccccggcaaacaactcacacaactcatcaaagctgcgtttctcgaattcaacctgcagtgcctgcttgagtgcgggcgacaagcccagcgccgccaactccggccgtcccagcgcgccacagagctgctgcataaacccaggctccaggctgcccactgacatccaacgcccgtcccgcgagcggtaataatcgtaaaagctgccaccgttcagcacatggctttcgcattcaggctcgacgtcgcacgccaggtagcccgcgccggccatggcgttcaggctgaacgagcagtcggtcatgctcacatccagagactggccgaccccgctctgctgccgggcgatgactgccgcgagcagccccaccaccgcatgcagcgagcccccgcccacgtccgccaactgcacgcccagtggcaacggtccactgtcctggcgcccggtgtagctggcgattccggccagcgccaggtaattgatgtcatgcccggcgcggtccttatacgggccggtctgaccgtaaccggtgatcgacacataaatgagccggggattgatcgccttcaacgcctcatagcccaagcccaggcgctccatcaccccaggccggaactgttcgaggacgatgtcgtagtccttgaccagcgtccgcacgatctccagcgcctcggcctgcttgaggtccagcgccaggctgcgcttattgcggttgaggtaggcgtggctggccgacgtgccctggtcgtggggcggcagtacgcgcaacaggtccatgcgcgtgggcgattcgatgcgcagcacctcggcgcccatgtccgccagcatcagcgacgcgaacgggccaggcagcaaggtggaaaaatccagcactttgagggacgccaagggacctgacatgggcactccatttcggttttgaatgcccacagactaggcagccttgcgccagtcggcaatcgccggaacagtcaccaacagtgaccgttttgatcacggcgggctttttcgtggcggcggctttatcattggcccacgtttgcttgcagagtgttccatgaagtttgcgattgcagtgttttgtgccgcccatgcgccctcctcgcgccgcgccctgctgttcgcccaggcggcgctggccggcgggcatgagattgtgcggctgtttttctatcaggacggcgtgtacagcgcgtccaattcggtggttgcgccccaggatgagcaggacatcgcccgtcaatggcgggagtttgtcagcgcgcatcaactcgacagcgtggtgtgcatcgctgccgccttgcgccgtggcgtgctcaaccaggaagaagccacgcgttatcaacgcagtgcggtcaacctcgatgcgccgtgggagctgtcgggcttggggcaattgcatgacgccgcgcaggccgccgaccgcctgatctgttttggagggccgtgacatgtccaaatccttgctggtcatcagccgccaggcgccgtggtccggccccagcgcgcgcgaagcgctggacatcgtgctggccgggggcgcgttcgatctgcccattggcctgctgttcctcgatgacggcgtattccagctggcgccgcatcaagacgccaaggccgtgcagcaaaaggacctcagcgccaatctgcacgcgctgggcctgttcggtatcgacgaggtattcgcctgtagccatagcctggccgagcgcggcctcacgacgcccgccagcgcacagccgctggacagtgctgcgatctcccagttgattgaccgttacgaccaggtgataaccctctgatgtcgactctacatgtggtttcccactccccgtttaccgatagccgcctggacagctgcctgcgtatctgtggcgtaaatgacgccatcctgctctgcggcgacggcgcctacgggttgcacaacgcggcgctgcacaccaaaggcgtgaaggtgtttgtactggccgaagacatgcaggcgcgcaacctgccactgcccgactgggccgacagcgtggactacccaggcttcgtgcagttgtcgctcgactacgacaaggtcaacagctggctatgaacaccctgaccgtaggcactcgcagcctggaactggacaaggacggctaccttgtcgacctgaacgcgtggtccgaagaagtcgccaacgccctggccgccgccgaaccgctggcgttgaccgcggaccattgggaaatcctcacactgctgcgccagttctatgccgaattccagctgtcacccgccacgcgcccgctgatcaagtacaccgccttgaagctgggcccggaaaagggcaacagcctgcacctcaacaaactgttcaacggcactcccgccaaactcgccgccaagctggcgggcctgcccaggccgacgaattgcttatgaccgactttgccccgctgacccttgaaacccctgccgaacacccgtttgcgcaattcgtgcgcatcctgggcaaaggcaagcgcggtgcgcgcaacctcacccgtgaggaggcgcgcgaagccatgggcatgctgctcgacgaaaaagtcgaggacacccagctcggcgccttcctcatgctgctgcgccacaaggaagaaagcccggaagaactggccggtttcaccgaagccgtacgcgaacgcctgaacgctccggcgctgaatgtggacgtcgactggccgacctacgccggcaagaaacgccacctgccgtggtacctgctggcagccaagtgcctggcgcaaaacggcgtgcgcatcctgatgcacggcggcggcgcccacacggcgggacggctgtacaccgagcaattgctggagggtttgcagatcccgctgtgccgcaactggcagcaggtcgaagccgcctacgcacgcggcagcctggcctttatcccgctgggtgactgggcgccgcagttgcaacgcatgatcgacctgcgcaacaccctgggcctgcgctcgccgatccactccctggcgcgcttgctcaaccccttgaatgcgcgccttggcctgcaaagtattttccatccgggttaccagggcgtgcaccgcgatgccagcggcctgctcggcgacaatgtaatcgtggtgaagggcgacggcggcgagatcgagatcaatcccgactcggccagtcacctgtacggcaccactggaggcgaaagctgggacgaagagtggcccgccctctccgcccagcgccacgtcaaaccggccacactcgaacctgagcatctgaaagcgctgtggcgcggtgatgtcgaggacagctacccacaactggccctgatcgcgaccatggccctagccttgcgtggcctgggtcattcacgggaacaagcgttcgccctggcccagcaatactgggacgcgcgggacaaatcgatttaatcgatgattaacccccggtctttgcgcttttagttcgaactcatccctttagactgggctccaacgcttattagcctaggagccagtcatgggtttgctgatcgaaggacgctggaaagaccagtggtacgaaagtagcgcggacggcgcgttccagcgcgaacaggcgcaacgccgccactgggtcaccgccgatggcgcgcccggcccgagtggcgaaggcggcttcaaagccgaggccggtcgctaccacctctatgtctccctggcctgcccgtgggcccatcgcacgctgatcctgcgcaagctcaagggcctggaaagcctgatcgacgtgtcggtggtcagctggctgatgctggaaaacggctggacctttgacaaggcccacggttccaccggcgacaagctgggtgatttcgacttcatgcaccagcgctataccgccgacaccgccgattacaccggacgcgtcaccgttccggtgctgtgggacaaaaagctcaagcgcatcgtcagcaatgaatcggcggagatcatccgcatgttcaacgacgccttcaatgaattgaccggcaacaccctggacttctacccccagccgctgcgcacgaccattgacgcgttgaacgaacgcatttacccggcagtgaacaacggcgtataccgcgcaggcttcgccacctcacagcaagcgtatgaaagtgcgtttgatgatgtgttcgccgagctggatcatctggaacagcacttgggcgaccatcgttacctggccggtgaatacctgaccgaggcagatgtgcggctgttcaccacgctgattcgttttgatgcggtgtactacagccacttcaaatgcaatttgcgcaggattgcggattatccgaatttgtcgaattggttgagggagctgtatcagtggccgggagtggcggagacggtggattttgcgcacatcaaggggcattactatgccagccatcgcacgatcaatccgacagggattgtgccgaaggggccgttgcaggggtttgatgaacagcacgatcggaagcaattgattggcaaaggcgtgtggaactgatccgacgtattggctggcttttagggcctcatcgggggcaagccccctcccacactggaatgcagtccaatgtgggagggggcttgcccccgatgctttcaaggctcagacctgggactgcgcgccctcaaaccacttcagcttctcgcgcaacaccaccacctcacccacgatcaccagtgtcggcgcatgcacttcatgctccgccaccatgcgtggcaaatcggcgagggtgccggtgaacacgcgctgattggacgtggtgccctgctggatcaacgctgcgggggtgtccgatgcacgcccgtgcttgatcagctgttcgcagatgatcggcaagccgatcaagcccatgtagaacaccagagtctgcgaaggtcccaccaggtcatgccagggcaggtccgaggtcccgtccttcaaatgcccggtgataaaacgcaccgactgcgcatagtcgcgatgggtcagcggaatcccggcatatgccgcgcaaccgctggccgcggtgatccccggcaccacctggaacgggatgccatgggcggccagttcctcgatctcttcgccaccacgaccaaagatgaacggatcgccacccttgaggcgcagcacgcgcttgccctgcttggccaggtccaccaattgctggttgatctggtcttgcggtacggcatgatcagcgcgacgtttgccgacatagatgcgctcggcatcacggcggcacagttcgagaatcgccggtgcaaccaggcggtcatacagcacaacgtcggcttgctgcatcaggcgcagggcacggaaggtcagcaggtcgggatcacccggacccgcgcccaccaaataaacctcgcccggcgcataaggcggcgcgccgttgaccttttcgatcagcaggcgctcggcctcatcaccctgcccggccaactggcggtcagcaatcgggccctggaacacttcttcccagaacgcacgacgctgctgcacatccgggtacaagcctttgacctgggcacgaaaacgcgccgccagcccggccagttgaccgtaggtggacggaatccaggtttccagcttggcgcggatcaagcgcgccagcaccggcgcatcgccgccgctggacactgcgatcaccaacggtgaacggtcgacaatcgccgggaagatcacgctgcacaaggctggcgcatcgaccacgttgaccggcacgcaacgacgcttggcatcgctggacacttgcgcgttcagcggctcgtcgtcggttgccgcgatgatcagggtgcaagcatcgaggtcggcctcctgatagccgcgcagaatcagttccccgccactgcccagtaccagttcacgcaactggtcttcgatctggggagcaaccacccgcagcaccgccccggcgtcggccagcagccgggatttgcgcaaggcaatctccccgccaccgacgaccagcacacgactgccgcgcaggttatgaaacagcggcagaaattccatttagcgaatgacctcaacgcccgccatgtacggcttgagcacttccggcacacggatcgagccgtcagcctgctggtagttttccagcacggccaccagggtacggccaaccgccaggccggaaccgttgagggtgtgcaccagctccggcttgccggtttccgggttgcggaaacgcgcctgcatgcgacgggcctggaaatcaccgcagttggagcacgacgaaatctcgcggtacttgtcctggctcggcacccagacttcgaggtcgtaggtcttcacggcgctgaagcccatgtcgccagtgcacagcgccagtacgcggtacggcagctccagcagttgcaggacacgctcggcgttggcggtcaggccttccagtgcgtccatggaggtcgatggctcgacgatctgcaccatctcgaccttgtcgaactggtgctggcggatcatgccgcgggtgtcgcggccggaggcgccggcttcgctgcggaagcacgggctgtgggcgacgaacttgatcggcagttgcttggcgtcgaggatctcgccggagacgatgttggtcagcgacacttcggcggtcgggatcaggtacaggtcggcttcgccgtcgcggctgatcttgaacaggtcttcttcgaacttcggcaactggctggtgcccatcagcgccggcgcctgcaccaggtacggggtgtaggcctcttcgtaaccgtgctcgccggtgtgcaggttgatcatgaactgcgccagggcacggtgcaggcgtgcaaccgggccacgcagcagcgagaagcgcgcgccggacatcttggcggcggtttcgaaatccaggccaccgctcagttcgcccagggcgacgtggtccttgatctcgaaatcaaaggctttcggcgtaccccagcgacgcacttcgacgttgccgtcttcgtctgcgccgatcggcacggattcgtgcggaatgttagggatgcccagcaggatcgaatccagctcggactggatcttttccagctcgaccttaccctcggacagctcggtgcccatgcgctcgacatccgccatcaacggcgcgatgtcttcgccgcgctgcttggcctgaccaatggatttggaacgcgcattacgctcagcctgcagtgcttcggtgcgggtctggacggtcttgcgctgttcttccagcgcttcgatgcgcgcaacatccaaggcaaagccacgggatgccaggcggtccgctacgtcctgaaggttgctacgtaacagtttggaatcgagcatgtcggtctctcgtttatcaaagtttggtcaaggacaggccggcccaggtggcgagcagcccgccgaatacgctgatggccgcatagccaattgccagcggcacttgcccgctttccagcaggcgcacggtatccagtgaaaaggatgaaaaagtcgtcaggccgccaagaaagccaaccatcaggccggcacgtacctcgataggcacttccgggcgcagcaaaaacaggccgtataacacgccgatcaacaggcagcccacgatattaacggcgagcgtcgccgtatagaagtgtttcggccaattggcgttgatccaattgcccgtggcaaagcgcagcagtgtacctgcgataccacccgccgaaacggcgacaaccagaggaatcatgactttctccgctgccgggggctcaggcggtcgagggtggcaaggtgattaagcttttcaccaatcttcagctccaggccacgaggcaccggctgatacaacggcaacggctcaagctcatcgggaaaatagtcttcaccggccgcataggcatccggttcatcatgggcgtaacggtattcatcgccataacccagctgcttcatcagcttggtcggcgcattgcgcaagtgcatcggcacttcgagcgagccatattcggcggcggcgcgcagggcggatttgaagcccatgtaaaccgcattgctttttggcgcgcaggccaggtaggtgatggcctgggccaccgccaactcaccttccgggctgcctagtcgttcctgcacgtcccatgccgccaggcacaggctcagggcacgcgggtcggcgttgccgatgtcttcgctggccatgcgcaccacgcggcgggccaggtacagcgggtcgcaaccgccgtcgatcatgcgtgcaaaccagtacagcgcaccatcggggttggagccgcgcacggatttgtgcagcgccgagatctggtcgtagaaggcttcaccgcccttgtcgaagcggcggcgcgtgtcgccgagcaggctttgcaggaggtcgacgccaatctcaccgccgtcttcggccaggtcggaggcgttttccaacaggttgaggaaacgacgaccatcgccatcggcggccgtcagcaggatcttgaagccctcttcgctcacgctcagttggcgcttgcccaagcccttgtcttcgttcaaggcgcgctgcagcagcttctgcatcgccgcctcgtccaggcttttcagcacatagacccgcgcccgcgacagcaaggcgttgttcaattcaaacgaagggttctcagtggtggcaccgataaagatcagcgtgccgtcctccacatagggcaggaacgcatcctgttgcgacttgttgaagcgatgcacttcgtcgacgaacaggatggtgcgcttaccatactgcccggcctgctgcttggcgacttccaccgcctggcggatctccttgaccccggcgagtaccgccgagaccgtttcgaagtgcgcatccgagacttttgctaagagccgcgccagggtggtcttgcccacccccggcggcccccagaaaatcatcgagtgcagcgcgccctgctccagggcttcacgcaggggcttgccgcgagcgagcaggtgttcctgaccgacgtactcatccaggttggtcgaacgcaggcgtgcggccaatggctgggcaatcgggtcacttcgaaacagatccatgggcagcgtttgaaacctctggggaatttattcctggatcacgtcggcacccttggggatgtcgaacttgaacttggacgccggtaccggctggttggccttgaccccggagaacaggatatcggtgcgctggccgacactgtcgatcaggcgcatgttgttgatcacgccgttaccgaacgacaaggacagggtgtcgaacagcgtgtccttggatttcggcttgagggtgaactcgatcacgttgctggtctgcttggaggtaatgtcgaagctgtcattgatcttcgacacgtcacccgagagcaacagcgccggagtctggttcaggcgcgggtcgagcttcttgatggtcgcctgttccaggtccgggtcccacagggtgaccttctggccatcggacacgatggtctgctcagccttgccttcggtgtgccaatagaacaggccaggacgctgcacggccatttcgccagcggtttcctgcaactgggtgcctccggcatccaaggtcaactgggaaaagcgcgcggtcagggtctgggatttgtcgagcaggttcttcaggctggcgacggaggccgggtcagcgtgagccgaaacagcggtcagggccagtgccggcaacaacagcatgcggataaagcgcatgggagtcctcattgagtagtcagggcgcgccgcgtgctgtcacgcggcgcgggatcagtcgcgcatctgcccgggggcaatgacttcgcgcgagccgttggtgttcattgcggtcacgacgccagcgttttccatggcttcgatcatacgagcggcacggttgtagccgattttcagcttgcgttgcaccgcggaaatcgaggctcgacggctttcgagcacgaacgccacggcttcatcgtacagcgcatcggtctcggcatcatcgtcgccaccgccgctgccgccatcgaagccgctgccggcttcttccacaccggcgaggatgtcatcgttgtactccggtgcgccgcgcagtttccaggcttccaccacacgatgcacttcatcgtcggaaacaaaggcgccgtgcacgcggatcggcaggctggtgcccggcggcatgtagagcatgtcgccgtggcctagcagttgttcggcgccgccctggtcgatgatggtccgcgagtcgatcttgctcgacacctggaacgccatgcgcgtcgggatgttggccttgatcaggccggtgatcacgtccaccgacggccgctgggtggcaaggatcaagtgaataccggcggcacgggccttctgggcgatacgcgcgatcagctcttcaaccttcttgccgacaatcatcatcatgtcggcgaattcgtcgaccaccaccacaatggtcggcagcttggtcagctttggcgcttcgtcgtgaatgctttcgcgccggtacaacggatcatcgatggtctcgccgcgctcgtgggcttccttgatcttggcgttgaagcccgacaggttacgcacgcccatcttcgccatcagcttgtagcggcgctccatctcggcaacgctccagcgcagggcgttggcggcgtccttcatgtcggtgaccaccgggcacagcaggtgcggaatgccttcgtagatcgacagttccaacatcttcgggtcgatcatgatcagcttggcgtcttccgggccggacttgaacaggatcgacaggatcatcgcgttcacccccaccgacttaccggaaccggtagtaccggccaccagcaggtgcggcatcttcgccaggtcggtgatcaccggcttgccgccgatgtcatggcccagggccagggtgaccggcgatttgaagttgtcgtactcgggcgtcgacagcacttcggagaagcgcacgatctggcggtcttcgttgggaatctcgatacccacggtggtcttgccgggaatcacttccaccacacgcacactggtcacggccagggaacgggccaggtctttcgccaggttggagatgcgactgaccttcacaccggcggccggctggatttcgtaacgggtgatcaccgggccgggatggatggagtccaccgacacttcgacaccaaactccttgagcttgatttccagcaggtggccgacggccgccagggattccggagaatagttgagttgtttcttttcggccgggtcgaggatcgagatcggcggcaaggtgccttcgacggcgctgtcgacgaacaacggtgcctgtttctctttctgtacgcgatggctcggttcggccggcttgggcggcgcgggggcaatcactggcggcacctgtttctcgcggtccgacatgtgcttgctcagggcctgctcgcgctcgatcaggcgttccttgacctttgcctgctcgcgccggtccggtgtgctcggcgccaccacttcgttgacacgggtgtccacctcacgcagctgggcaaccatgcgcttgcgctcgacacgggccgcccaccagcggttggcggcgccctggaacagctccagcaagtcgagggtgatcttgccggtcacgtccatcaccttgaaccatgacaggtcggtgaacacggtgaggccgaacaggaacagtgcgatgaacatcagggtgctgccctggatattcagggtccggcgcgccaggtcgccgaggctttcacccagcgcaccaccggcgcccgccggcaggccggtgggtgcatggaaatggatatgcgccagggccgcgccggacaacaccaggaacaccaggccgatcaggcgccaggaaaacagccatccgctccactgccacggctcgtggcgctggcggaagatctgccaggtcttgatcgccaacagcaacgggaagatataggcgaagtaacccagcaccatgaacaggatatctgcgctgtaggaaccggcaggcccaccgaagttctgcacgtcttcgatcttgctgttgtggctccagcccggatcgtccttgccataggtcagcaaggccatcatcaggaacaggcacagtgcgccgatggcgatcagcgcaccttccttgaggcgataatgcaggtgctgacgccaggccggcacgactgctgctttaggtgttgcggcggatttcttcaaaacgggtcttttcctgcgccttgagcgcgtccatctgttgaatgactgcaaatactgcccaatccgagcagctgaaaaatgaacgagcgtcgttgaatctactgtttaacaccgggcgattgctggatgaaatgacgataacgccacaatggccgcattgtacgggtttgtctccctgatgccacgccgcttggcgctcttccagcagcatagccaattgtgtgtcacaagatgttcaatttgagcatgcattgtctttgctgacaaaggcttatgagctgtttttaccaatccaggcaagcttggcaaatggcctgcatggaatagacccgattacgaccacgcccccggcatagagttgcagaaacacctgctcacgctaatcccccttaatgcctgattcgggctggcccgatggcgccaggtcgacaataatcagcactgccgccgcaggtgccatacctgccactcccctccccttccgcaaagcctggatgccatgctgacctggttacaacgcgattcaatgatcttccctgccttggccaaagccatgcgcgaacccaatggcctgctcgccgccggcggtgacctcagcgccgagcgactgatccaagcctatcgtcatggctgcttcccgtggttttccgagggccaaccgatcctgtggtggtcgcccgacccacgcaccgtgatattccccgacgaactgcatgtatcgcgcagcctgggcaaactgttgcgccaacagcgctacagcgtgaccttcgaccaggacttcgccgccatcatccaggcctgcgccgcacctcgcgcctatgccgatggcacctggatcaccgaaggcatccagagcgcctacctggaactgcaccagcgcggctacgcgcattcggttgaggtctgggacaagggtgaactggtaggcggcctgtatggcctcgcaatgggccggctgttttttggcgaatccatgttcagccgcgccgacaacgcctcgaaattcggctttgccacgctgacccgtcaattgcaggcctggggttttgtgctgatcgactgccagatgcccaacgaccacctgcacagcctgggtgcccgcgccatatcccgcaacgacttcgcagggttcctgcgcgaccatctggaccagcccaacgccggaccatgggtttcctaggcgacatcggcgctcctggcttacacttatttcaaagcttatccgagggttgatcatgaccgagttggcgcgtttgaagttttatgccactcaaccccactcttgcagctatctgcccgacgagcaggccaccacactgttcctcgaccccagccagcctatggacgtgcatgtgtatgccgacctgtcggagatgggctttcggcgcagtggcgaccatctgtaccggccgcattgccagaactgtaatgcctgcgtgcccgcacgcatccccgttgcgcagtttctgccggaccgcaaccagaaacgcatcctcaagcgcaacgccgacctgacggtgacatctgccaagccgcgcttcaccgaagaatatttcgacctttaccagcgctacatcgagcaacgccacgccgacggcgacatgttcccgcccagccgcgatcagttttccacctttctggtacgcgacctgcccttctcgcgcttctacgaatttcgtgcgaacggccgcctggtggccgtcgcggtgaccgatctgctgcccaatggcctgtcggcggtctacaccttctatgaacccgccgaagaacgccgcagcctcggacgcttcgcgatcctctggcaaattggcgaagccttgcgccaggaactggaggcggtgtacctcggctactggatcaagaactgcaaaaagatgaactacaagacccaatatcggcccatcgaactgctgattaatcaaagatgggtcgtgcttaactagaaccccttggcttaaacaccctttttcgggcacaatgcacgccgcttttgcctggcgcagttgcaccgggccattcactggataccgagggctttactgcatgtcgaaagaagacagcttcgaaatggaaggcactgtcgtcgacaccctgcccaacaccatgtttcgtgtggagttggaaaatgggcacgtcgtaaccgcgcatatctccggcaagatgcgcaagaactacattcgtattcttaccggtgacaaagtgcgcgtcgagctgacgccctatgacttgagcaaagggcgcatcacttaccgcgctcgctaagcaagtcaatacaaaacgcccggttatgccgggcgtttttgtgtgtgcgctatttaccaaacgccaaaaccaaatgtgggagggggcttgctcccgatagtggtagatcagtcactcatgtagcgactgaaacactgctatcgggggcaagccccctcccacattgacgcccaccgctatcgatcaggccatttcagccgtggtttcgaactcgaaggtcagctcgccgtccttcaggtcgatgtgcaccacgccaccatggtcggagagctcgccaaacaggatctcttcggccagtggccgcttgatcttgtcctggatcagacgcgccattgggcgtgcgcccattgccgcatcgtaaccgccttcggccagccaactgcgcgccgcgtccgtgacctccagctgcacgcgcttgtcttccaactgcgcctggagctcggtaaggaacttgtccaccacacttttgataacctcatggctgaggcgaccaaactggataatggtgtccaggcggttgcggaactccggcgtgaagctcttcttgatcacttccatggcatcagacgagtggtcctgatgcgtgaagccgatcgaagcccgcgcggccgtttcggcaccggcgttggtggtcatgatcacgatcacgttgcggaagtccgccttgcgcccgttgttgtcggtcagggtgccgtggtccatcacctgcaacagcaggttgaagacttcagggtgagccttctcgatttcatcgagcagcaatacacaatgcggttgcttggtaatcgcctcggtcaacaggccgccctgatcaaagccgacataacccggaggtgcgccgatcaggcgcgacacggtgtgacgctccatgtattcggacatgtcgaaccgcaccagctcgatacccatggccttggccaattggcgcgccgcttcggtcttgccgacgccggtcgggccggcgaacaggaacgaacccaccggcttgtctggcgacttgaggcccgcacgcgacagtttgatcgcagtggacagcgagtcgatggccgcgtcctgaccgaacacggtgagcttgaggtcacgctccaggttacgcagcagctccttgtcggaactggtgacgtgttttggcggaatccgcgcgatcttcgccacgatgtcctcgacctgcggcacgtcgatgcgcttcacacgcttctcgaccggctgcaggcgctgataggcgcccgcctcgtcgatcacgtcgatggccttgtccggcatgtgccgatcattgatgtagcgcgacgccagctcagcggccgaacgcagggcttcatcggtgtactcgatgccgtggtgcgcttcgaagcgccccttgagcccgcgcagaataccgatggtgtcttctaccgaaggctcggacacgtcgaccttctggaagcgacgtgccagggcacggtctttctcgaagatgccacggaattcctggaacgtggtcgagccgatgcagcggatatcacccgacgacagcagcggcttgagcaggttggaggcatccatcaccccaccggaggccgcaccggcaccaatgatggtgtggatttcgtcgatgaacaggatcgcctgcgggcgttttttcagctcacccagcagcgccttgaagcgcttctcgaagtcgccacggtacttggtcccggcgagcaaggcgcccagatcaagggagtagacgacgctgttggccagcaggtccggcacctggttgtccacgatgcgcttggccaggccttcggcaatcgcggttttacccacgcctgcctcgcctaccagcaacgggttgttcttgcgacgacgcgcgaggatctgcgctacacgctcaacctcaagctcacgccccaccagcggatcgatccgcccctggcgcgccagctcgttgaggttgctggcataggcatccagtggattgcccgaagaagaagactcaccgccctcgtcgtcctgcatatcctgctcaccctcggaatgatcgccgtgcccgggcaccttggagataccgtgggcgatgtagttgacgacatcgatacgggcaacgctctgctgtttaagcaggaacactgcctggctttcctgttcgctgaaaatcgccacaagcacattggcgcctgtgacttcacgcttaccggagctctgaacatggaacacggcacgctgaagcacccgctggaagcccagggttggctgggtctcacggtcttcatcgtggactggaataagtggcgttgtggagtcgataaactcctgcaggtcatgcttgagtttgtcgaggttggcgccgcacgcacgcaaaacggtggcggcagcttcgttatccaaaagtgccagcagcaggtgttcgacggtcatgaactcatgacgcttcgaacgagcctccttgaaggcaagattgagggtgacttcgagctcgcggtttaacatagcttcacctcatacccaagtggtcggcgttaaccgtccttctcgatttcacagagtagcggatgctggctttccctggcgtactggttgacctgcatggcctttgtctcggcgatgtcgcgggtaaacactccacatactgcccgtccttctgtgtgaacggccagcattaccttggtcgccaactcgcggttcaggttaaaaaacacctcgagtacttcgaccacgaaatccatcggtgtgtagtcatcattgaacaaaaccaccttgtacatcggcggcgcctgtagagcaggcttggcctcctgaacagcaatgcctgcagaaccgtcgtcatcatgttcctgatccggtcgatcctgattgaatgttagtcgaatctggctgtttgcatgcatggaaagaaaggttcgtcagtggttcaaatacagtggtgggggcgacctgtcagattttcaactactgaccgactggtcgccttgactatcggcgaaacggtgttacaaccaatagaacccacagtgggtaaaaaaggtccgcgcagtcaaccttatttattcgggttaggacggataaactggatgatactccagtgatggagtctggtgcagagggatatgggcatggcaagcggtaaggtcaagtggttcaacaatgccaaaggttacggcttcattaatgaagacggcaaggatgaagacctttttgcgcattactcagcgatccaaatggacgggtataaaacgctgaaagcggggcagccggtctcctttgacattattcaggggcccaaaggcaagcacgcagtcgcaatcagtgcgccagtcaccatcggcacagcaaaagacggcgtcgctcaaaaaccaaaagagcaactggcctgatcggccaccgagcaagcgcctaataaaaaaccggccattccgtttacggtatggccggtttttttattgccaatcgcttacatatgcgagatcagcgcatcaccaaagcccgacgacgacaccagcttcgcaccctccatcagacgctcgaagtcataagtcacggtcttggccgaaatcgcaccattggtgcccttgatgatcaagtcagccgcctcgacccagcccatgtgacgcaacatcatttccgccgacaaaatcaacgaacccgggttgacctggtccttgcccgcatacttgggcgcagtaccgtgggtcgcctcgaacatcgccacggtatccgacaggttggcgcccggcgcaataccaataccgcccacttccgccgccagggcatcagacaggtagtcgccgttcaggttgagggtcgcgatcacgtcatattcagccggacgcagcaggatctgctggagcatggcgtcggcaatcgcatccttgaccaccacgttcttgccggtcttcggattcttgaactgcatccaagggccgccgtcgagcagcgtggcgccaaattcttgcgccgccacctcataggcccattccttgaaggcaccttcggtgaacttcatgatgttgcctttgtgcacgatggtcagcgaatcgcggtcgttatccactacatattgcagggctttacgcgccaggcgctgggtgccctctttcgagaccggcttcacgccaatcccgcaatcctggtcgaaacggatcttggtcacgcccatttcttccttgaggaacttgatcaccttgatcgcttcgggcgaaccggccttccactcgatcccggcataaatgtcttcggagttttcccggaagatggtcatgtccacgtcgccgggcttcttgaccgggctgggcacgccttcgaaccagcgcaccgggcgcaggcacacatacaggtcgagttgttggcgcagggccacgttcagcgaacggatgccgccccccaccggggtggtcagcgggcctttgatggaaaccacgtaatccttgaccgcatccagggtttcctggggcagccaggtgtcctggtcgtagacttgagtcgctttctcgccggcaaaaacctccatccacgagatcttgcgcttgccgccgtaggccttttcaacagctgcgtcgactaccttgatcatcaccgggctgatgtcgacgccgataccgtcaccctcgatgtaggggatgatcggttggtcaggaacattgagagaatggtctgcattgacggtgattttgtcgccgactgccggaacctgaatcttcttgtatcccatgctgaactccatctatggattgaacatctggctgcgttcgagcctactccagataaatggcgactgaaacctcgcgccatgctcatttgcttcgaaaacagcataatttgtcgcctacaagcctgaaagaaaaggcaaaatcgccaatcttgagcacatcgtgcgactttggtcgcaatcgcgcacctgcgacctttagaccaatggacgacacaccttttgtatgaaggctcggcgtaagcatagcgacctatgtataatgccgccgctgaccaaagagtcacgacggcggaccgctctagaacacagccttccgctacaaagcaggactattacaatagtccacccgcttgacgctcgactgatgcaacccaacatcaccgcgaagaaacctcgacatttcgctcatggatgactttgaacgaacgcgctccacccggcgcatctcgagtttctgcgcacgctttcagcaaagaagagagttaatccgaatatgcccacccgctcgaagatcatctacaccttcaccgacgaagccccggccctcgccacctattcactgctgcctatcgtagaggccttcaccgcttccgctgatattgccgtggaaacccgcgacatctccctcgccgcgcgcatcctcgcaagcttccccgagcaactgggcgccaaggctatcccggaccacctcgccgaactgggcgacctggccgttacgcctgaagccaacatcatcaagctgcctaacatcagcgcctcgactccgcagctgcaagccgcgatcaaggaactgcaggcccagggctacgccctgccggactacccggaaaccgtaaccaccgacgcggaaaaagaaacccgtgcacgttacgacaaggtcaagggcagcgccgtgaacccggtactgcgcgaaggcaactccgaccgccgcgcaccgctgtcggtcaagaactacgcacgcaagcacccgcacaaaatgggcgcctgggctgccgactccaagtcgcacatcgcccacatgagcaacggcgacttctacggcagcgaaaaagccgtacagatcgaaggcgctgatgctgtcaaaatcgagctgatcgcccaggacggcaccgccaccgtcctgaaggaaaagacctcggtacaggcaggcgaaatcatcgacaccgccgtgctgagcaagaaggccctgcgcgcattcatcgccgctgagatcgaagacgccaagaaacaaggcgtgctgctgtcggttcacctgaaagccaccatgatgaaggtctccgacccgatcatgttcggccagatcgttgccgagttctataaagacgccctggccaagcacgccaccgtgctggaacagatcggcttcaacctgaacaacggtatcggcgacctgtacgcgcgcatcaaggccctgccggccgagcagcaagcacagatcgaagccgacatcgcagcggtctacgccgctcgccctgccctggcgatggtcaactccgacaaaggcatcaccaacctgcacgtgccgagcgacgtgatcgtcgacgcctcgatgccagccatgatccgtgactccggcaagatgtggggcaccgatggtcagctgcacgacaccaaggcggtgatcccggatcgctgctacgccaccatctaccaggctgtcatcgaagactgcaaagccaatggcgccttcgacccaaccaccatgggcagcgtgccgaacgttggcctgatggcgaagaaagccgaagagtacggctcccacgacaagaccttccagatcaaggctgacggcgtagtccgcgtcaccgacagcaagggcaacctgctgatggaacagaacgtcgaagccggcgacatcttccgcatgtgccagaccaaagacgcgccgatccaggactgggtcaaactggccgtcaaccgtgcccgcgccagcaacaccccggccatcttctggctggacccacagcgcgcacacgacggcgtcgtggtcgagaaggttcaggcttacctgaaagaccacaacaccgaaggcctggacatccgcatcatgtcgccggtcgacgcgatgaagttcaccctggagcgcacccgcaagggcctggacaccatctcggtgaccggcaacgtactgcgcgactacctgaccgacctgttccctatcatggaactgggcaccagcgccaagatgctgtcgatcgtgccgctgatgaacggcggtggcctgttcgaaaccggcgccggcggttcggcaccgaaacacgtgcagcaactggttgaagagaacttcctgcgctgggattccctgggcgagttcctggccctggccgcctcccttgagcatttgggtgtgacgtacaacaacccgaaagccctggtcctgtccaagaccctggaccaggccaccggccagttcctcgacaacaacaagtcgccatcgcgcaaagtcggcaacatcgacaaccgcggcagccacttctacctggcgctgtactgggctcaagccctggccgcccagaccgaagacactgcactgcaagcgcagttcggcgaactggccaagaccctgaccgcgaacgaggcaaccatcgttgccgagctcaacgccgtccagggcaagccagtggacatcggcggctactacgcgccgaacccggaactgaccagcaaggccatgcgcccaagcaacaccctcaatgcggcgattgccaagttgaagtaaggttgtaaggatgtaaagaagccccggccccgtgccggggtttctgtttaatgtgctttcttgctgaaaaaacccaatcaaactgtgggagggggcttgccccccgatagcagtaggtcaggcacagatagttcaactgacactccctcatcggggcaagccccctcccacactgactattatcctgtttcaggactgcaccgcatcttaaatccagaggcaaccatgacctggcaaccccacatcaccgtcgccaccatcgtcgaagacaacggcaagttcctgatggtcgaagagctcaagggcggccgcgccgtgctcaaccagcctgccggccacctcgacccagacgagaccctgaccgaggccgccgtacgcgagaccctcgaagaaaccggctgggacgtcgaagccatcggcatcgtcggcatctacctgtacaccgcccccagcaacggcgtgacctaccaacgggtctgcttcatcgccaaggccctgaaacaccacccggactatcaactcgacgaaggcatcctccgcgcccgctggctgagccgtgacgagctgatgagcgtgcgcgacgactggcgcagcgagctgatcatccgctgtatcgatgattatctggccggccactgccacagtctcgaattgatccgcccttctctttagccttgaaggcccgagcctgatagaatcgcgtcctttttcaagacacccgttgaaaccctatgcgtgatccagccccttctgacacacaaaagaagcgcgtcatcgtcggcatgtccggcggcgtggattcttccgtttccgccgttctgctcatggagcagggttatgaggtggaaggcctgttcatgaagaactgggaagaagacgatggaacggaatactgcaccgccatggacgacctggcggatgcccaggccgtgtgcgacaagattggcatcaagctgcacaccgccaacttcgccgccgagtactgggacaacgtgttcgagcacttcctggccgaatacaaggccggccgcacgccgaacccggacatcctgtgcaaccgagagatcaagttcaaggcgttcctcgactacgccatgatgctcggtgccgacctgattgccactggccactacgtgcgccgccgcgacatcgatggccgcaccgaactgctcaagggcctggacccgaacaaggaccagagctacttcctgcatgccgtcggcggcgaacagatcgccaagaccctgttcccggtaggcgagctggaaaaacccgaagtgcgcagaatcgccgagaaacacggcctggctaccgccaagaagaaggattccaccggcatctgctttatcggcgagcgccgcttcagcgacttcctcaagcaatacctgccggcgcaaccgggtgagatccataccaccgaaggcgaagtcatcggccgccaccatggcctgatgtaccacaccatcggccagcgccagggcctgggcatcggcggcttgaaagacgccggtgaagagccgtggtacgtgctggtcaaggacttggaaaacaacgtgctgatcgtcggccagggcaacgaacacccactgctgttctccggcgccctgctcgcctccgagatctactgggtcaacccgatcgacctgagcacgccacgccgcctcaccgccaaggtgcgctatcgccagagcgaccagccgtgcaccctggaaaaaaccgccaccggctaccgtgccacctttgatgacccgcaacgcgcggtcaccccaggccagtccgtggtgttctacgatggcgaaatctgcctgggcggcggcgtgattgaaatcgccgaagcctggagccacaaggcatgagcccgacccaggagcaattgacggcactgggcggggtgttcctcgccgcggtattggtggacaagatcgccaagaccggccaggtcaccgaagccggcctgacctgcatgctcggcagcctgctgatccgcgaccccaaggacactctggaagtctacggtggcgacgacctggcgctgcgtgaaggttaccgcgcactgatcggcgccctggagcgcgaccccagcaccctgcagcgcgagccgctgcgctatgccctgtcgatgctcggcctggagcgccaactggccaagcgcgaggacatgctggaggtcatcggcaaacgcctgccgcagatccagtctcaggtggaacacttcgggccggcccacgagaacgtaatcgccgcctgtggcgcgttgtaccaggacaccttgagcaccttgcgccagcgcatccaggtgcacggcgacatgcgcaacctgcaacaaccgaacaacgcctcgaaaatccgcgccctgctgctggccggtattcgttcggcgcggttgtggcgccagttgggcggccatcgttggcagctggtgatcagccgtcgcaaattgctcaaagagctttacccgttgatgcgcaacgaataagtcgcagcagcaggccattttcaagccgttacgcgtaatacgccggtcagttggcaacggaccggcggattttttcatgtatgatacgcgccccatttcgttgcccgactgtccgagaacaccccatgcagctctcttcgctcactgcggtttcccctgtagacggccgctacgccggcaaaacccaggccctgcgccctattttcagcgaatacggcctgatccgtgctcgtgtactggttgaagtgcgctggctccagcgcctggccgctcaccccgccatcagcgaagtgccggcgttttccgccgaagccaacgctgtgctcaacaccctggcggaaaacttctccctggagcacgccgagcgtgtgaaagagatcgagcgcaccaccaaccacgacgtcaaagccatcgaatacctgctcaaagagcaagcggccaagctgccggaactggcccaggtcagcgaattcatccactttgcctgcaccagcgaggacatcaacaacctgtcccacgccctgatgctgcgcgaaggccgtgatgacgtgatgctgccgctgatgcgccagaccgccaacgccatccgcgaactggcgatccgcttcgccaacgtgccgatgctgtcgcgcacccacggccagccggcgtcgccgaccaccctgggcaaagaactcgccaacgtggtgtaccgcctggagcgccagatcgctcaagtcgccgccgtaccgctgctgggcaagatcaacggcgccgtgggcaactacaacgcccacctgtcggcctaccctgagatcgattgggaagccaacgcccgtgccttcatcgaagatgagctgggcctgggcttcaacccgtacaccacgcagatcgaaccgcacgactatatcgccgagttgttcgacgccattgcgcgcttcaacaccatcctgatcgacttcgatcgcgatatctggggctacatctccctgggctatttcaagcagcgcaccattgccggtgaaatcggttcgtcgaccatgccgcacaaggtcaacccgatcgacttcgaaaactccgaaggcaacctcggcatcgctaacgccctgttccagcacctggccagcaagttgccgatctcccgctggcagcgcgacctgaccgactccaccgtactgcgcaacctcggcgtaggcttcgctcacagcgtgatcgcgtacgaggccagcctcaaaggcatcagcaagctggagcttaacgagcagaagatcgccgctgacctggacgcgtgctgggaagtcctggccgagccaatccagaccgtgatgcgccgctacaacatcgaaaacccatacgagaagctcaaagagttgacgcgcggcaagggcatcagccctgaagcgctgcagactttcatcgacggcctggacatgccagccgccgccaaggccgagctgaaactgctcaccccggccaactacatcggtaacgctgtagagcaagccaagcgcatctgatcatcgcaagaccctttgagacgcccggccgcgccgggcgtttttattccagtctgaaaagtgctttttttcaataggttacacatgaatcctgatatccctcttcaacttctgggcggcatcacggcacgggaattcctgcgcgactactggcagaaaaaaccgctgctgatccgccaggccattcctgatttcgaaagcccgatcgacgccgacgaactggccggcctggcgctggaagaagaagtcgagtcgcgcctggtgatcgagcacggcgagcgcccctgggaactgcgccgcggcccgttcgccgaagacgccttcagcaccctgcccgagcgcgagtggaccttgctggtgcaagccgtcgaccagttcgtaccggaagtggccgagctgctggagcagttccgcttcctgccgagctggcgcatcgacgatgtgatgatcagcttcgccgcaccgggcggcagcgttggcccgcacttcgacaactacgacgtgttcctgctgcaagcccagggcaagcgcaactggaagatcggccagatgtgcagctccgaaagcccgctgctgcagcacgccgacctgcgcatcctcgccgaattcgaagaaagcgccgagtgggtcctggaaccgggcgacatgctctacctgccaccacgcctggcgcatttcggcattgccgaagacgactgcatgacctattccgtgggcttccgtgcaccgagcgcggccgaagtgctgacccacttcaccgacttcctcagccagtacctgaccgacgaagagcgctacaccgacgctgacgcccagccggtcagcgacccgcaccagatccagagcgacgcgctggaccgcctcaagagcctgctggccgagcacatgagcgacgagcgcatgctgctgacctggttcggccagttcatgaccgaaccgcgctacccagaactggtagccggcgaagagttgggcgaagacgacttcatcagcagcctgcaagatggcgccatcctggtacgcaacccgagcgcgcgcctggcctggtccgaagtggacgacgatgtattgctgttcgccagtggccagagccgttacctgccaggcaaactgcgtgagctgctcaagctggtgtgctcggccgatgcgctgcacagcgagaacctgggcgaatggctggcggacgaagacggccgcgatctgctgtgcgaattggtcaagcaaggaagcctgggatttgccgatgaataggattcacgtaagtgtcgcggactggcaaaaggatatcgccgagattcggcgcattcgtgaagcggtgtttatcgctgaacaatcggttccaccggagctggagtgggacgcggacgacgccggcgcagtgcatttccttgcattcgaaggtaattttccgatcggcaccgctcgcctgctgcccagcggcgagatcgggcgcgtgtcggtactcaaggattggcgcgggcttaaagtcggcgacaagctgatggaagcggtgattggcgtggccgagcaacgcggccagaccaagcagttcctgagtgcgcaggtgtatgccgcgccgttctatgagcgactgggcttcaagatcgtcagcgacgaattcctggaagtcgggattccgcatgtggatatggtgcgcgagggctgattcgagaccgcgtcgctgccatcgggggcaagtcgaatcgtcgcaccgcccctcccacattttgaccgagtaagtcctttggaatgcggtcaagtgtgggaggggcggtgcgacgattcgacttgcccccgatagccatttcagcaacaccaacaatgccctgccatgccagggcattttgccgtctaggattcaacttgcacccggccaggccgacaaactggcactatcaagcctaaatgactcgcagagataacggacatgtccctacgcaccctgctcaccgccctcctgttagccaccagcgtcacggccatggccgacaccgaagtggtcaacctgagcaaccgtaccagcgcagacctgctgcccgtggcgcagaacttcatcggcaaggacggcaccgtcagcgcttatggcaaccagctgatcgtgaaggccgaccccggcaagatccaggacctgcgcgccttgctgtctcagctggacactccggccaaacgcctgctgatcaccgtcgacaccaacgaaaacaaccagcagaacaccggtgacagccagacgcgcatcatcagctacggcaccaccagccgcgacggcggtacgcagcagatccaggccagcgaaggcgtgcctgcgctgatccaggtcggccagagcgtaccgctgaccaccacccagcaagatagctacggccgcctgcaaaatcagacccagtatcgcaacgtgacccagggcttctatgtgaccgcgagcgtcaccggcgagaccgtgcacctggcgatcagcaccaatcgtgaccgcatgagccaggagcgtcccgatgtagtgaacgtacagagtaccgacacaaccatcagtgggcgcctaggcgagtggatcaccctgtccggcatcaatcgcgagacccaggctgataaatcctctacaacccgcagctactctactcagggccgtgatgacctgacggtgcgggtcaaggtcgacaccctgaactgaagcaccaaaaactgactgatgagtcgtattagactaaagatgtagtgcttgaaaaaaagcactacaaaacatttgacgatccaaaaaagcctgggcatgatggcctcgctcccgctaatcaggggccctggcaagggccttcggatcgcgctccaagctacccacctgagccgattcgtgtctgtaccgcccacaaggcgtgtttgacgaggttgcgactggaacgaagttgtcccgagggacggaagctaaccaggtaacccggctacacgctgttgaacacccgagggcccacgacgcccgaagactgttctcggcccgcctgtacctgcccgaccctctcgccactcgttcatcccgtcgcattccccgccagacccgacatgaccgcctaagcttctggtcagcgagcagccctgcccacgcacttgaatgcagggctggcaaatggatttttccaccacacgaagacgcgacgaggtttacttccatggcactgacacgcgaacagcaaattgcagccctcgagaaagactgggctgaaaacccacgctggaaaggcgtgacccgcgcttattccgctgctgacgtcgtccgcctgcgtggctcggttcaacctgagcacacctttgcaaaactcggcgccgagaagctgtggaagctggttacccaaggggccaagccttccttccgtcccgacaaagatttcgtcaactgcatgggcgccctcactggcggccaggcagtccagcaggtgaaagccggtatccaggcgatctacctgtccggctggcaagtggcggcggacaacaactccgccgaatccatgtaccccgaccaatcgctgtacccggtggactcggtgccgaccgtggtcaagcgcatcaacaactcgttccgtcgcgccgaccagatccagtggaaagccggcaagaacccgggcgatgaaggctacatcgactacttcgcgccgatcgtggccgacgccgaagccggtttcggcggcgtactcaacgcctacgagctgatgaagagcatgatcgaggcaggcgctgccggcgtgcacttcgaagaccaactggcttccgtgaagaaatgcggccacatgggcggcaaggtcctggttccaacccaggaagctgtacagaagctgaccgctgcccgcctggccgctgacgttgccggcacgccaaccatcatcctggcgcgtaccgatgccaacgcggctgacttgctgacttcggactgcgacccgtatgaccagcccttcgtgactggcgagcgcacccaggaaggcttctacaaggtacgtgccggtctcgaccaggccatcgcccgcggcctggcctacgcgccgtacgccgacctgatctggtgtgaaaccgccaagccggacctggacgaagcccgtcgtttcgccgaggcgatcaagaaggaatacccggaccaactgctgtcctacaactgctcgccgtccttcaactggaagaagaacctggacgacgcgaccatcgccaagttccagcgcgaactgtccgccatgggctacaagcaccagttcatcaccctggccggcatccacaacatgtggcacagcatgttcaatctggcgcacgactacgcccgcaacgacatgaccgcctacgtgaagctgcaggagcaggagttcgctgacgccgccaagggttacaccttcgtggctcaccagcaggaagtgggcaccggctacttcgacgacatgaccaccgtgatccagggcggcacctcgtccgtgaccgcgctgaccggctcgaccgaagaagagcaattccactgatcgactgagtacacggccactgcggccccaaggaagacctaaccgcagtgccgcacaaagatcacgccccgacctgttcggggcgttttttttgccccgtgaaaaacctccctgtcaaaatgaagatcaacctgtgggagggggcttgcccccgatggcggcgggtcaatcacagacgtatcaactgacatcccgtcatcgggggcaagccccctcccacactggaaatgccgacgcggctctggattttgtgcaaaacattgatccagagcggtattggcacgaataaaatcggttaaaagatccccgtcggcaactaagcggtattcaaccaagtaacagcaacttccctcgccccaccacacacacccgcttaaaatccgcgcaaacaatattcattatcatttagcgcatgaaaacttcgttaccggttaaacaaaacacatttgattaaatgcccgctaatgcccgccacataagggctgcagccccaagaaggtgcactatgtgcttattccaccgaataatttcgccataggaattttacttgcccggtgtttagccataaaatcaccgcgattgattgcagtgcgacatatcgtcactgcatcgttactttttcgagctcagagacctttgctctctgttaaggatttccagcatgaccgaagcgacaggactcatggcccacaactggggctttgccattttcctcctcggtgttgtcggcctctgcgccttcatgctcggtgtttccagcctcctcgggtcaaaagcctggggccgcagcaaaaatgaaccgttcgagtccggcatgctgcctacaggtggcgcccgcttgcggctctcagccaaattctatctggtcgcgatgctgttcgtgatcttcgatatcgaagccctctttctctttgcctggtctgtgtccgtccgcgaaagcggctggaccggattcgtcgaagccctcgttttcatagcaattctgttggcaggccttgtctacctattccgagtgggcgcccttgactgggctccggaagctcgtcgtaagcggcaagcgaagctgaaacaatgaggctttggcgatgcaatacaatctcaccaggatcgacccggatgctcctaacgagcagtaccccatcggcgaacgggaaaccgtttccgacccgttagaagaccaagtccacaaaaacatctacatgggcaagctggaagacgtgctgagtggcgcggtcaactgggggcgtaaaaactccctgtggccgtacaacttcggtctttcgtgctgctacgtggaaatgaccaccgccttcacggcgccccacgacatcgcgcgctttggcgccgaagttatccgggcctcgccgcgccaggcggatttcatggttatcgccggtacctgcttcatcaagatggcgccgatcatccagcgtctctacgagcaaatgctcgagccgaagtgggttatctccatgggttcgtgcgccaactccggtggcatgtacgacatctattccgtcgttcaaggggtggacaagttcctgcccgtggacgtctacgtgcctggctgcccgcctcgccctgaagcgttcctgcaaggcttgatgctgttgcaggaatcgatcggcaaggagcgtcgtccgctttcctgggtcgtcggtgatcaaggcgtgtaccgcgccgagatgccgtcgcaaaaggaacagcgccgcgaacagcgaatcgcagtcacaaacctgcgcagccccgacgaagtctgatccagcaccgcttcttttatagaacgaacacctggcttcattctttacgttgaccgaaagcgataaaaaaccatgactacaggcagtgctctgtacatcccgccttataaggcagacgaccaggatgtggtcgtcgaactcaataaccgttttggccctgacgcctttaccgcccaggccacgcgcaccggtatgccggtgctgtgggtggcgcgtgccaagctcgtcgaagtcctgaccttcctgcgcaacctgcccaagccgtacgtcatgctctatgacctgcatggcgtggacgagcgtctgcgcaccaagcgccaggggctgccgagcggcgccgatttcaccgtgttctaccacctgatgtcgctggaacgtaacagcgacgtgatgatcaaggtcgcactaaacgaaagcgacttgagcatcccgaccgtcaccggtatctggccgaacgccagctggtacgagcgcgaagtctgggacatgttcggcatcgacttcccgggccacccgcacctgacgcgcatcatgatgccgccgacctgggaaggtcacccgctgcgcaaggacttcccggcgcgcgctaccgaattcgacccgttcagcctcaacctcgccaagcagcagcttgaagaagaggctgcgcgcttccgtccggaagactggggcatgaagcgctccggcaccaacgaggactacatgttcctcaacctgggcccgaaccacccttcggcccacggtgccttccgtatcatcctgcaactggacggcgaagaaatcgtcgactgcgtgccggacatcggctaccaccaccggggcgccgagaagatggccgagcgccagtcgtggcacagcttcatcccgtacaccgaccgtatcgactacctcggcggcgtgatgaacaacctgccgtacgtgctctcggtcgagaagctggccggtatcaaggtgccggatcgcgtcgacaccatccgcatcatgatggccgagttcttccggatcaccagccacctgctgttcctgggtacctatatccaggacgtcggcgccatgaccccggtgttctttaccttcaccgaccgtcagcgtgcctacaaggtcatcgaagccatcaccggtttccgcctgcacccggcctggtaccgcatcggcggcgtggcccacgacctgccgaatggctgggaacgcctggtcaaggaattcatcgactggatgcccaagcgtctggacgagtaccaaaaggcggcgctggataacagcatcctcaagggtcgtaccatcggcgtcgcgcagtacaacaccaaggaagccctggaatggggcgtcaccggtgccggcctgcgttccaccggctgcgatttcgacctgcgtaaagcgcgcccgtactccggctacgagaacttcgagttcgaagtgccgctggcggccaatggcgatgcctacgaccgctgcatcgtgcgcgtcgaagaaatgcgccagagcctgaagatcatcgagcaatgcatgcgcaacatgccggccggcccgtacaaggcggatcacccgctgaccacgccgccgccgaaagagcgcacgctgcagcacatcgaaaccctgatcacgcacttcctgcaggtttcgtggggtccggtaatgccggccaacgagtccttccagatgatcgaagcgaccaagggtatcaacagttattacctgacgagcgatggcggcaccatgagctaccgcacccggattcgtaccccaagctttgcccacttgcagcagatcccttcggtgatcaaaggcgagatggtcgcggacttgattgcgtacctgggtagtatcgatttcgttatggccgacgtggaccgctaagcatgaacagcacgcttatccagacagaccgtttcaccttgagtgaaaccgagcgctcggccatcgagcacgagctgcatcactacgaagacccgcgcgcggcgtcgatcgaagccttgaagatcgtccagaaagaacgtggctgggtgccggacggcgccctctacgccatcggcgagatcctcggcatccccgccagcgacgttgaaggggtggccacgttctacagccagatcttccgtcagccggtgggccgccacatcattcgcgtgtgcgacagcatggtctgctacatcggcggccacgaatccgtggtcagcgagatccagaacaagctgggcatcggcctcggccagaccactccggacggccgcttcacgctgctgccggtgtgctgcctgggcaactgcgacaaggcgccggcgttgatgatcgacgacgacacattcggtgacgtgcagcctgctggcgtgacccaattgctcgagggctacccatgaccctgacttctttcggcccggccaacctgatcaagcgttcgcccgagacccacccgctgacctggcgcctgcgtgacgatgccgagccggtatggctcgacgaataccaggccaagaacggttacgccgctgcgcgcaaagccttcgccgacatggcccaggacgatatcgtccagaccgtgaaagacgccggcctcaagggccgcggcggtgcaggcttccccacgggcgtgaagtggggcctgatgcccaaggacgaatccatcaacatccgctacctgctgtgcaacgcggatgaaatggagccgaacacctggaaagaccgcatgctgatggagcaactgccccatctgctgatcgaaggcatgctgatcagcgcccgcgcgctgaaaacctaccggggctacatcttcctgcgtggcgaatacaccaccgccgccaagcacctcaaccgtgccgtggaagaagccaaggccgccggcctgttgggcaagaacatcctcggttcgggttttgacttcgaactgttcgtgcacaccggcgccgggcgctacatctgcggtgaagaaaccgcactgatcaactccctcgaaggccgccgcgccaacccgcgctccaagccgcccttccctgccgccgtaggcgtgtggggcaagccgacctgcgtgaacaacgtcgagaccctgtgcaacgtgccggcgatcatcgccgacggcgtggactggtacaaatcgttggcccgcgaaggcagcgaagacatgggcaccaagctcatgggcttctccggcaaggtcaagaacccgggcctgtgggagctgccgttcggcgtgaccgcacgcgagctgttcgaggactacgccggcggcatgcgcgacggctacaccttgaaagcctggcagccaggcggcgccggtaccggtttcctgttgcccgagcacctcgacgcacaaatgtatgccggcggcatcggcaaggtgggcacccggatgggtaccggcctggcgatggcggtcgacaacaccgtgaacatggtgtccttgctgcgcaacatggagcagttctttgcccgcgagtcctgcggcttctgcaccccatgccgcgacggtctgccatggagcgtgaagctgctgatggccctggaaaacggcgaaggccgcgagggtgacatcgagaccctgctgggtctggtcggtttcctcggcccaggcaagaccttctgtgctcacgcaccgggcgccgtggaaccattgggcagcgcaatcaaatacttccgctcggagttcgaagccggcatcgcgcctaccagtgccgccgtcccgcctctggcgaggccgatcgtagtcggcgcgtaacgctttaacaggtgaagggtccgtgcccttcacctgctcatgggctgacgccgtaaaggctgtgttgacgcccatgaataacaagattccattagccacgcccgctgacaacgggccaacgaagaactttgaaccatggccactatccacgtagacggcaaagcgctcgaagtcgatggggcagacaacctgttacaggcatgtctctcactaggcctcgacatcccatatttctgctggcatcccgcgcttggtagcgtcggggcctgtcgccagtgtgcggtcaagcaatacaccgacgagaacgacacccgtggtcgtatcgtcatgtcctgcatgaccccagccaccgacaacacctggatctccatcgacgatgaagaatccaaggcgttccgcgccagcgttgtcgaatggctgatgaccaaccacccccacgactgcccggtctgtgaggaaggcggtcactgccacctgcaagacatgacggtgatgaccggccacaacgagcgccgttatcgcttcaccaagcgtacccaccagaaccaggacctcggcccgttcatttcccacgaaatgaaccgctgcatcgcctgctatcgctgcgtacgcttctacaaggactacgccggcggcaccgacctgggcgtattcggcgcccacgacaacgtgtacttcggtcgcgttgaagacggcgtgctcgaaagcgagttctccggcaacctcaccgaggtctgcccgaccggtgtattcaccgacaagacccactccgagcgctacaaccgcaaatgggacatgcagttcgccccgagcatctgccatggctgctccagcggttgcaacatctccccgggcgagcgctacggcgaactgcgtcgcatcgaaaaccgcttcaacggttcggtcaaccagtacttcctgtgcgaccgtggccgtttcggctatggctacgtcaaccgcgaagaccgcccacgccaaccactgttggccgacggcgccaagctgagcctggacgacgcgctggataaagccgccgacctgctgcgcggccgcaacatcgtcggtatcggctcgccgcgcgccagcctcgaaagcaacttcgcgctgcgcgagctggtcggtgccgagcacttctactccggtatcgaagccgctgagctggagcgcatccgcctggtcctgcaggtgctgaacgacagcccgctgcccgtaccgaacatgcgcgacattgaagaccacgacgcgatcttcgtgctcggtgaagacctgacccagaccgccgcccgcatcgccctgtcgctgcgccagtcggtcaagggcaaggccgaagacatggccgacgccatgcgcgtccagccctggctcgacgccgcggtgaaaaacatcggccagcacgcgctgaacccgttgtttatcgcgagcatcgctgaaacaaagctcgacgacatcgccgaagaatgtgtacacgcagcgccggacgacctggcgcgcctcggtttcgccgtggcccacgccctggacgcaagcgcgcctgccgtcgacggcctggacaccgaagccgtcgaactggcccagcgcattgccgacgccctgctggcggccaaacgcccattgatcattgccggcacctcgctgggttccaaggcgctgatcgaagccgccgccaacatcgccaaggccttgaagctgcgcgacaagaacggttccatcagcctggtggtgccagaggccaacagcctcggcctggccatgctcggtggcgagtccctggacgctgccctgcaagcggtgaccgacggcaaagccgacgccatcgtggtgctggaaaacgacctgtacacccgcaccgatgccgccaaggttgacgctgcactgaacgcggccaaagtgctgatcgtcgccgatcaccagaagaccgccaccagcgaccgtgcccacctggtactgccggccgccaccttcgccgaaggcgacggcaccctggtcagccaggaaggccgcgcccagcgcttcttccaggtgttcgatccgaagtacatggatgccagcatcctggttcacgaaggctggcgttggctgcatgccctgcgcgccaccctgctgaaccagccgatcgactggacccaactcgaccacgtcaccgcagccaccgctgccagcgccccgcaactggcgcggattgtcgacgctgcaccgtccgcctcgttccgcatcaagggcatgaaactggcccgtgaaccgctgcgttactccggtcgtaccgccatgcgcgccgacatcagcgtgcatgaaccgcgtaccccgcaagacaacgacaccgcgttcgccttctccatggaaggttactcgggttcggtcgaaccgcgtcagcaggtgccgttcgcctggtcgccgggctggaactcgccgcaggcctggaacaagttccaggacgaagtcggtggtcacatccgcgctggcgacccgggcacccgcctgatcgaaagcaccggtgatgcgctgaactggttcgccgccgtaccgcgtccgttcaacccggcccagggcacctggcaggtcgtgccgttcttccacttgttcggcagtgaagagaactcctccaaggccgcgccggtgcaaagtcgcattcctgaggcctacgtatccgtggccaagtccgaagccgaccgcctgggcgtcaacgaaggtgccttgctcagcctgaacgtggccggccagaccctgcgtctgccgctgcgcatcaacgacgagttgggtgccgggctggttgcactgcctaaaggcctcgccggtatcccgccggcgatctttggcaaaaccgttgacggtctgcaggaggcagcgcaatgacctggttcacccctgaagtgatcgacgtgatcatctcggtcgtcaaggccatcgtgatcctgttggccgtggtcgtcgcgggcgccctgctcagcttcgtcgaacgtcgcctgctgggctggtggcaggaccgctacggtccgaaccgcgttggcccgttcggcatgttccagatcgccgccgacatgctgaaaatgttcttcaaggaagactggaccccgccgtttgccgacaaggtgatcttcaccctggcaccggtcgtggccatgagcgccttgctgatcgccttcgcgatcatcccgatcaccccgacctggggcgtggcggacctgaacatcggcttgctgttcttcttcgccatggccggtctgtcggtctatgcggtgctgttcgccggctggtcgagcaacaacaagttcgccctgctgggcagcttgcgggcttcggcccagaccgtgtcctacgaagtgttcatgggcctcgcgctgatgggcatcgtggtgcaggtcggctcgttcaacatgcgcgacatcgtcgagtaccaggcgcagaacctgtggttcatcattccgcagttcttcggcttctgtaccttcttcatcgctggcgtggccgtgactcaccgtcacccgttcgaccagccggaagcggaacaggaactggccgacggttaccacatcgaatacgccggcatgaagtggggcatgttcttcgtcggtgaatacatcggcatcatcttgatctcggccctgctggtcacgctgttcttcggcggctggcacggaccgttcggcatcctgccgcagttggcgttcttctggttcttcctgaagaccgcgttcttcatcatgttgtttatcctgctgcgcgcttccattccgcgtccacgatatgaccaggtgatggatttcagctggcgcttctgcctgccgctgaccctgatcaatttgctggtgactgctgccgtggtgctgatgcacgcgccagcggctgcggttcagtgaggatttgacccatgttcaaatatattggcgacatcgttaagggtaccggtacccagttgcgaagcctggtgatggttttcggccatggctttcgcaaacgcgacaccctgcaatacccggaagaagcggtgtacctgccgccgcgctatcgcggccgcatcgtactgacccgcgaccccgacggcgaagagcgttgcgtagcctgcaacctgtgcgccgtggcgtgcccggtgggttgcatctccctgcagaaagctgaaaccgaagacggtcgctggtacccggacttcttccgcatcaacttctcgcgctgcattttctgcggcctctgcgaggaagcttgcccgaccaccgcaatccagctcacgccggatttcgagatggccgagttcaaacgtcaggacctggtgtacgagaaagaagatctgctgatctctggtcccggtaaaaaccctgattacaacttctatcgtgttgcaggtatggccgttgccggtaagccgaaaggcgccgcacaaaacgaagccgagccgatcaacgtgaagagcttgctgccttaaggaagaaagatggaattcgctttctatttcgcatcgggtatcgcggttgtgtccacgcttcgcgtgatcaccaacaccaaccctgtgcacgccctgctctacctgatcatttcgctgatcgccgtggccatgaccttcttcagcctcggcgcgccgttcgccggtgtactggaagtgatcgcctacgccggcgccatcatggtgctgttcgtgtttgtggtgatgatgctcaacctggggccggcttcggtcgcccaggaacgcgtctggctcaagcccggcatctggctcggcccggttgtcctggcagcgctgctgctgggtgaactgctgtatgtgctgttcgctcaccagagcggccaggccatcggccacaccaccgtggatgcaaaagccgtgggcatcagcctgttcggcccgtacctgctggtggtcgaactggcgtcgatgctgctgctcgctgcagccgtcaccgccttccacttgggccgcaacgaagccaaggagcaatgacgatgcctgctatccctttggagcatggtctggcggtcgccggcatcctgttctgccttggcctggtcggcctgatggtccgccgtaacattctgttcgtgttgatgagcctggaaatcatgatgaacgccgcggcactggcgttcatcgttgcgggtgcacgttggggccagccagatggacaagtgatgttcatcctggtgatcagcctggcagccgccgaggccagtattggcctggcgatcctgctgcaactgtatcgtcgcttccacacgcttgatatcgacgctgccagtgagatgcgcggatgaacatgatctttctgactttcgtattccccctgatcggtttcctgctgctgtcgttctcccgtggacgctggtcggaaaacctctcggccctggtgggcgtgggttccattggcctgtcggcgatcgtcgccgcctacgtcatctggcaattcaacgtggcgccgccggaaggcggtcactacaccctggtgctgtggcagtggatgtcggtggagggcttcaagcccaacttcgccctctacgtcgacggcctgtcgatcaccatgctcggcgtggtcgtcggcgtgggcttcctgatccacctgttcgcgtcctggtacatgcgcggtgaagccggctactcgcgcttcttctcgtacaccaacctgtttatcgccagcatgctgttcctggtgctcggcgataacctgttgttcctgtacttcggctgggaaggcgtgggcctgtgctcgtacctgttgatcggtttctactacagcaaccgcaacaacggtaacgcagccctcaaggcgtttatcgtcacccgcatcggcgacgtgttcatggccatcggcctgttcatcctgttccagcaagtgggcacgctgaacatccaggaactgctggtgctggcaccgcagaaattccaggtcggtgacttctggatcaccctggctaccctgatgctgctgggcggcgccgtgggtaaatccgcgcaactgccactgcaaacctggctggcagacgcgatggctggccctaccccggtttccgcactgatccacgcggccaccatggtcaccgccggtgtctacctgatcgcccgtacccacggcctgttcaccctggcgccggacatcctgcatctggtcggcatcgtgggtggcgtgaccctggtcctggccggcttcgctgccctggtgcagaccgacatcaagcgcatcctcgcctactcgaccatgagccagatcggctacatgttcctggccctgggcgttggcgcctgggacgcggcgatcttccacctgatgacccacgccttcttcaaggccctgctgttcctcgcgtccggtgcggtgatcgttgcctgccaccacgagcagaacatcttcaagatgggcggcctgtggaagaaactgccactggcctacgccagcttcatcgtcggtggtgccgccctggccgccctgccgctggtgaccgccggtttctactcgaaggacgaaatcctctgggaagccttcgccagcggtaaccagaacctgctgtacgcaggcctggtgggtgcgttcatgacctcgctgtacaccttccgcctgatcttcatcaccttccacggtgaagccaagactgaagctcacgcaggtcacggcatctcgcactggttgccattgtcggtactgatcatcctgtcgaccttcgtcggcgccatgatcactccgccgctgcacggtgttctgccgcaaagcgtcgggcatgccggcggcgcagcccagcacagcctggaaatcgcctcgggtgccatcgccatcgccggtatcctgctggcggccctgctgttcctcggcaagcgtcgcttcgtgacagccgtcgccaacagtggcattggccgcttcctgtcggcctggtggttcgctgcctggggcttcgactggatctacgacaaactgttcgtcaagccttacctcgccatcagccacatgctgcgcaaggacccgctcgaccagaccatcggtctgatcccgcgtgccgccaaggccggtcacaccgccctgagccgcagcgagaccgggcaactgcgttggtatgcagcctccatggctgccggtgctgtgctggtgatcggcgccatcgttgtggtagcggtctgactatgaatattgcgaacctgcgaaaggaaacgagcctgtcatgattctgccctggctaatcctgatcccctttatcggcggcctgctctgctggatgggtgaacgcttcggcgccaccctcccccgctggattgcgttgctgaccatgtccctggaactcgcgctcggcctctggctgtgggcccatggcgactattcatttgctccggcaccgggtgtcgatcccaccttcgcgcttgaattcaagcacgtgtggatccagcgcttcggcatcaacgtgcacctggccctcgacggcctgtcgctgttgatgatcctgctgaccggcctgctgggtatcctctcggtactctgctcctggaaagagatccagcgtcacgtgggcttcttccacctgaacctgatgtggatcctgggcggtgtcgtcggcgtgttcctcgccctcgacctgttcatgttcttcttcttctgggaaatgatgctggtgccgatgtacttcctcatcgcgctctggggtcacagttcttcggacggcaagaaaacccggatctacgcggcgaccaagttcttcatcttcacccaggcttccggcctgatcatgttggtggcgatcctggggctggtgctggtcaacttcaacaacaccggcgtgattaccttcaactacgccgacctgttgaagaccaagatgtccctgaccaccgagtacatcctgatgctgggcttcttcatcgccttcgcggtgaagctgccggtggtgccgttccactcctggctgcccgacgctcacgcccaggcgccgaccgccggctccgtggacctggccggtatcctgctgaagacggcggcctacggcctgctgcgtttcgccctgccgctgttcccgaatgcctcggccgagttcgcgccgatcgccatgaccctgggtctgatcgggatcttctacggtgcgttcctggccttcgcccaaaccgacatcaagcgtctgattgccttctcgtccgtttcccacatgggcttcgtactgatcggcatctactccggcagccaactggcgctgcaaggcgcggtgatccagatgttggcccacggtgtctcagccgcggcactgtttatcctgagtggccagctgtacgagcgcctgcacacccgtgacatgcgtgaaatgggtggcgtatggtcgcgcatcgcctacctgccggcgatcagcctgttcttcgccgccgcgtccctgggcttgccgggcaccggcaacttcatcggcgagttcctgatcctgatgggtgccttcgtgcaaacgccgtggatcagtgcgattgctacctccggcctggtgttcggttcggtctactcgctgatcatgatccaccgcgcctacttcggcccggccaagtccgacaccgtcctgcaagggatggacgctcgcgaactgatcatggtgctcggcctggcggtactgctgatctacatcggcgtgtacccgcaaccgttcctggacacttctgccgcaacgatgcatggcgtgcagcagtggttcggcaccgccttctctcaactcgcttcggcccggtaagagcgctatggaattcacgatccaacactttatcgcgcttgcgccgctgctgatcaccagcctcaccatcgtggtggtgatgctggcgatcgcctggcgccgcaatcactcgcaaacgttcctgctgtcctgtgccggcctgaacctggccctgctgtcgatcatcccggccctcaaggtcgcgccactggcggtcacgccattgatgatggtcgatgacttcgcgctgctgtacatcgcgctgatcctggtcgcgaccctggcctgcgtcaccctcgcccacgcctacatgggcgaaggcggcaccggttacccaggcaacaaggaagagctgtacctgctgatcctgctggctgcggccggtggcatcgtgctggtcagcgcacagcacctggccggcttgttcatcggcctggaactgctgtcgatcccgacctatggcctggtggcctatgccttcttcaacaagcgctccctggaagccggcatcaagtacatggtgttgtcggccgccggttccgcgttcctgttgttcggtatggccctgctctacgccgaagccggcagcctgagcttcaccggtatcggccacgccctggccaccaccagcctgcctgcgccaatcgcccaactgggcctggccatgatgctgatcggcctggcgttcaagctgtcgctggtgccgttccacctgtggaccccggacgtgtacgaaggcgccccggcgccggtggctgcgttcctggcgaccgcgtcgaaggttgcggtgtttgcggtgatggtgcgtctgttccagatctcgcctgctgccaacactggcgtgctgagcaacgtgctgaccgtgatcgccatcgcgtcgatcctgttcggtaacctgctggcgctgacccagaacaacctcaagcgtctgctgggttactcctccatcgcccacttcggctacctgctgatcgccctggtggcgagcaaaggcctggccgtggaagccatgggcgtgtacctggtcacctacgtgatcaccagcctcggcgcgttcggcgtgatcacgctgatgtcctcgccgttcaaaggccgtgacgccgacgccctgtacgagtaccgcggcctgttctggcgccgtccgtacctgaccgccgtactcaccgtgatgatgctgtccctggccggtatcccgctgactgccggcttcatcggcaagttctacatcgtcgcgaccggtgttgaagcacacgagtggtggttggttgcctccctggtactgggcagcgccatcggcgtgttctactacctgcgcgtgatggtcaccctgtacctgatcgagccgaacctgcgccgtgtggatgccgagctgcattgggaacagaaggcaggcggcgtgatgctgctggccatcgccctgctcgcgttcttcctgggcgtgtacccacaaccgttgctgaccctggtgcagcacgcggtattgggcgtttgatcgcttagcgagatgcagtcaacagaacggcgccttcgggcgccgttttgcgtttcaggggcaggggtttttaccctcccctattcacggaaatttcctcacccgcctgcctccccttccggcatctacccgatgaaggccgccgtatggtgtctgcgttttaggaaagttcccacattagggtcacttgaccctttgcgagtgggccaccaaactctacgtaggctacgtacagaacatggatgctctatttatcgaactgccggccttcgagcggcatcgcaaggactatctgagtgacgagcttttccagggttttcaacaagagttgatgaagaacccggaagcaggagatgtgatcgagggaacaggcggactgcgcaaagttcgcttcatcgatgagcgacgcaacaaaggcaagcgcggtggcctgcgggtcatttactactggtggtcgggcggcacgcaattctggctgttcaccctgtacggcaagcacgaacaggatgacctgacaccacagcacaaaaaagccctaaaacacatgctggacagggaaatcaaagcgagaacacatcatgaaacgtgaaatcttttccgaactggtcgaaggcttcgacgccctggcagacgaacgccaaggcaaagtcaccctgcgaacccataaggttcatctcaatcaactggagccgcttaccgccgaggaggtggtggccgtgcgccagcaactcaacctctcccggtcggtgttcgccatgtacctgcgcaccaacacccgtaccctggaaaactgggaacaaggtcgggccaagccaaatgcccaggctgccacgctgattcgcctggtggcacgttttcctgagaccgtggcgcaacttgccgctttgggttgatctgcaattacctcaaaaaaaacgccccggacattgggggcgtttttcggtgcatcgcgtcagaaagcgataccgaccttgaagccgtactcgttacgcttgagcttggtgttgtcagccacttcggagtcaccgtcgagcttgtactcggtgcgggtgtagtacaggcccgcgactaccggcaggtcacccttctgattcatcagcaagctgacttcggcgtaggggttggtgcggtccttgaggtcgacggtgtcgctgccgaaatcatccaccttgagcttggtgcggccatcaatggtacgacgggcaccggcttcgacacgcagggtcatgtcatcgaactggtggttgtagcccagagccgccttggcgaacggcgatttgttggtgagcttcacatcgaggtcgttgatctctggctcgtagcgggtccagctgtagccgccaccgacgatcacgtcgacaaaattgcgcgcatccagcgcggcacgccagccgagatccaggtcagcctggccttccttgagtttgttgtcgctcttttcaccgtacttggcttcgataccggcctggtagataaagccggattcggcggtgagcttgttgccgaagttgtagaacaggccggcctcaggcatgtggctcttgtcgctctcgctgccgccttcgaatttgaagtcgttgtagctgcccaggatcccgaaggtggaaatcgggtcggtggacggtgcggcgaacaccacggcaggcgcagcgaccagcgccagcagtgaggaacccttgaggaattttccgaatagcttggacatcgttttacatctccttgtctggtgagcaaattattcaggaaccgcttcgaaccccggcgcgtgccaaaggttcgaattaatttgcgttgatttggaggtaaaacggttcagcgaaggctctttctcgctattcctgggcagcagcctggaccaagccatcaagggtttgccgaagcgttgccgtatccggcacgcgaatcccgaaggtttcagtcagcacctgcaccacctcatcggcactgccaagcgagcgttttacgctcggccggtccagggagtggatcgcatagtgggcattgttcagggtatggcgcttgcccggcgccaggcgcgcgactttcagttggccgacgaataccgatttcgggtgggtggagacgtaccagttaccgatttcataatcgatatccgcctgtacttgcaggtcgaacacatacaggccgcgccactcctcggccacttgtgcccacaaggtgtaacttccctgcccgtcgaaagtcaggcgatacggttcatgggccgtggcctgcaccgcttcggtgtccagttgcaacgggctgctgggcaccatgccgccaaagccgacatcggtgatgtagcgcacgccgtccagagtcaccaggctcaagcgatgggtacgcgccgtgcgcgcatccggcggcccgcccatcaccacccggccggtgatgccacgcgcctcgaagccgagttcctgcagcaacgccaggaacatctggttcagctcatagcaatagccgccccgcccgtccaccagcactttttgttcaacactgggcaggtcgatcggcaccggcaggcgtatcaggctcgacaggttctcgaaggcaaagctgcacacatggcgcagttgcaggtcctgcaaggtttgcagggtgggcgccggcggcgtgtcataacccaggcgttgcaggtagaggcggctatgggtcagcagaggcatggcacgatccttgggcgcaggaagaaagcgtcactatgccgcgcccgcatgcagattgtcattttgaatgaacctttttgaacgctgccctatccatctataacaacacagggaggcaacatgagtaccgcaaaaatctacacgatcaattatcagctgcacggtcaaccgaaaacctttgtggtgcgtgccgaagtaatgaacaacgccgaggcctggcactgggcggcggtggatgccgatattgcccatgtgagtcgcgtgggacgcgtggggcatgagcaggtcaagaaaaccacccggccctgggcggagaagtttgggattacggatgtcacgtggatcgcacccaagtaagtgaacagcctcaccttgcaaggtggggcttccaacaccctttgcagttgaccgtttgcccatcatgagcagagctaacgcttcagtgaaatcaattcaattttactcgacctgtgccccgcctaaactacatcctaattattgatactcgaaatcaatctggcacctgaacaacccatcaggtgtgtcccagaaatcaggatgtcaggtcaccatgaacagcgagtttgaattcactcttaaaacccagcgtttcgacgaacattatcacccctcggaaaacacgcgcatcaccactaactttgccaacttggccaggggcaaaagtcgccaggagaatctgcgcaacacactgaggatgatcaacaatcgtttcaatgcattggcgcaatgggataaccccaagggtgatcgctaccgagtggaacttgatatcgtctctgttgaaatgaacattgactctgaacagcgtggcaacgccatcccgctgattgaaatattgaaaacaacgattgtcgatcaacacaccgatgaacgcatcgagggtattgtcggcaacaacttctcctcctacgtgcgcgactacgacttcagcgttgccttgtcagcgcacaaccagaatcagaccgagttcagcacacccgagaactttggcgacttgcatggaaaactgttcaagcacttcgtcaactcaaacacgtacaaagaaaacttcaaaaaaccgccggtgatctgcctgagcgtttcaaacaccaggacctatcatcgcaccgaaaaccagcatcctgtactgggttttgaataccaacaggacgcctactccctgacggatgactacttcaataaaatgggattgaaggttcgctacttcatgccttcaaacagtgttgcgccgctggcgttttatttttccggtgatttgctggcggattacagcaacctggaactcatcagcaccatcagcaccatggacactttccagaagatttaccggcccgagatttacaatgccaattctgcagccggcaaatcctaccaacccagcttgaagcaccaggattattcactgacgctgattgtctacgatcgagaagaacgcagccgcctggccattgaacagggaaagtttgtggaagagcacttcatcaaaccctaccaggctgttcttcaacagtggtccgcccactgcgcgctttgacgctttaatactacaaggtcatccctgatgaaaaagttgttacctacttcaaccgccggcagtttgcctaaaccttcctggctggctcaacctgaaacactgtggtcgccatggaaactgcaagatgaggcattgaccgagggcaaacacgacgccttgcgtttgtccctgcaggaacaacaacacgcgggcattgatatcgtcagcgacggcgaacagacgcgccaacactttgtgacgacgtttattgagcacctcagcggtgttgatttcgagaaacgcgagaccgtgcgcatccgtgatcgttatgacgcgagcgtgccaacggtcgtaggggctgtttcccgccagaagccggtgtttgttgaagacgccaagttcttgcgccagcaaaccaagcaacccatcaagtgggcgctgcctggccccatgacgatgatcgatacgctgtacgacaaccattacaagagtcgtgaaaagctcgcctgggaattcgccaaaatcctcaaccaggaagcccttgaactagaagccgccggggtggacatcatccaattcgatgagccggccttcaacgtgttctttgatgaggtgaacgactggggcgtggccaccctggaaagggccattgaaggcctcaaatgtgaaaccgccgtgcatatctgctacggctacggcatcaaagccaataccgactggaaaaagacgctgggatcagagtggcgtcaatatgaagaagccttccccaagctgcagcaatccagtatcgatatcgtctcgctggagtgtcacaactcccatgtgcccatggagctgattgaacttatccgcggcaaaaaagtgatggtcggggccattgacgtggccagccacacgattgaaacgccggaagaagtcgccaacaccctgcgcaaagcattgcagtttgtcgatgccgacaagctctacccttgcacgaactgtggcatggcgccgctgcctcggcacattgccaggggcaagctgaatgcgttgagtgccggcgcagccattgtccgaaacgaactctcgaacccgtagtaagaatgcgcaaggcctgacgatttcaggccttgcctggcgcattcgcacgccccccaattcaggaccgcctatgtcacctcccatcgagcccttgcgctttcgagaagccctcgggcactacgcgtccggtatcacggtgattacctcccacgttgatggcgagccggtcggcttcacttgccagtcgttctacagcgtgtcgatgagcccgccgctggtgtcattcagcgtcatgtccaattcggccagctatcccaggattcgccaggccggccggttcgccgtcaatatcctgtccggcgatcaagtcaggatttccaaccagttcgctcggcgaggcacagacaagtggcacggcgtggagtggcagggatcaccactgggcaacccgctcattgccggcagcctgcactggctggattgcgaaattcacgccgaacacgccgcaggtgatcacctgatcgtgatcggcgaagtgaaagccttgaacctgcatgaagcgactgcttcacagccattactgtatttcaaagggcagtatcgcgacctcgccacgcacgatgcgtgtcggcaagaatgagccgcgagcactgtggccggatcaagtcttcaaatctcccagcggatcgtaaggcggtttgcgctcgtccttgtcggtgtttttctgatccaatggcgcgatagccgggccaatggggtccacctgcggatccgatacatccggtgaatccggatcaaaccccagttcatcctgaccactggaatgctcacccgaagccgggcctttcgctgtgtcactcacggcgttctcctcatttaaagtgggcgagccttgtcatgcaggctttcaaggtcttcctcgacgcgttcaacgtcgtcgtcctgacgctccgccgggtcgttggggcgtaacgcatcgttgtcgcgttcctcctctccgggtgtgcggtcagggttgggggtgccaggcggtggttgcttgtattcgggcatgatggctcacctcaaagggtcttcatcaatttagagaaaccgccgtgcagcatcgttcaacttgtttgcccaagcgtgagatgatgccggccccttctggagagatgacccggatgttcgagctcaaaccctgcgaccctgtcaccttccgtcaacagacccggcgcagcacgctgatcgtggccgtgttgttcgtcgcactggcgatgctgctgtcgagcctggcggtgatgctgtttggtgcgcccggcggtgacaatttccgcttcaatgtcggcggggtgttcgccggggtgctgatcaccctggccctggtgcgtggcccgttctggacccaggcgtggctgacgccggcggtgtatggctggcagctcaagcgcagcctgatgagcgtgaccaatgtgatgcacaaggtcaccgagcgggtgcaggccaatgacccgacggcaatcaaggtgctgcgcttctaccacttgggcttgacgcagatgcatgaactggatgccaactccagcgcccaggtgcagttgctggctgaggtggaggcgcacaaggccaggatgcaggcgctggggatcgacaccgaacaaacccgtctcgaccccgcctggctggcagcctttaaaaccgcttaagccagcatgccgatgcgctgctcgtcgggccagaacagcgccgcctggccgcacggctggccggcgtcatcgagcaaggtccacaccaccccagcatgaatcatgaacggctggttgtgcgcatccacccgccaaccgctgtaaccctcggcgatgccgtgggcggtgacttgctccagcagaagctggcgcgcggcgcgatcgagggccgaggcgctgaagcgtgagggcatgccgataaagctctcgcgcgggtatttgaagcactgcaaggcgcagtcattcacatacgtaaatcgcggatctgcgccgccatcatgggccagcaggctgtagggcgcgtcgctgtgcagccaggccaggcgctgttgcgcgtccaggtgtgccggggccggcagtccctggccagtccagtgtcgataggccttatccagcacgcctacgaaggtttcttgagaggacacgtacaacctcacatcatcagttggaattttttgcccgccagcagaacaccgcgctcacggcgatggctgcaccggccaggccaaacacccacggcgccgaagcgatcggcaacagcaggccggcgagcaaggggccaaggccggcgccgatatcgcgccacacggcattcgaggccaaggccgatacccgcatcgacccggggttgcgctccgctaccagggtggtcaccagcggcagttgcaacgcacgcaacaccagcaccgccgccgcgccgacaatcacccagtaactaccgaacgccgtcagggccagggcactcaggaacgaaaacagcagcagcatcgaggtggcgccaaaacgctgggccgcgcgaccgcccaacgggctcaggagcatttccgagacataacgcagcgccatcaggccgccggcaatcagcaccgcatccccgcccagcagcttctgcgcctggatcgacaggccgaagataaacagcccgtccagcgctacgccctcgataaacgaccacaccgccacactgtccggccatttgaagcgtcggcccggggtgctgtgcaaatcatgcccgaccgtaggtaagccgcgcgccatccacaagcccaccaggcaacacccggccagaatcagaaagatcggacgcggcccggcccacagcgtcagccagccgcccaggggcagcgccagcatcggccccagggcgatcaacgcccgcgagcgtccggcgcggcgtgcggcaccggcgggctccgaggtggccagcacttgggtcgacaggttcaatgcggcaaaacacaggccccacaccaggcgcaggcagagcaatgcggcaaacccggacaacatcgagttgcccaccgcacacaaggtcgcggcgccggcggcgatcatgcaggtcaggcggtcgccgttgcgtgcgtagaaattgagcacatgccggtagccgaaaatccgcaccaggcggttggcggccagcaacaccccggcctgggccagggtgataccgaacgcctgggattccatgggcagcagcaggtagagcaacacgtcactgggcaggcataaagccagggtcaaagcggcgcggcgggaatgagtatcagcggtgcggagggccaggctggacataaatctgaaacatcccgaaatattcaggtcgccacggtagcgttaatcagacctttttcccatagggcaacaaacgcagaccactggccaccgcgcccaccagtgcaaacccgcagcccagccacagcgcatagtgcgggccactgcccacggacaagtgaaaacacagggccaccagcgaagcacccagcgtctggcccaacaggcgtgaaatcgccacgatgccgctcgccccaccgctgcgggccaagggcgcgctggtcatcaacgccttgaggttgggtgactggaaaaacccgaacccggccccgcacagcgccatgcgccagccgatatcaaatgccgaggcgccgctgcccagggtggccaacgcagccatccccacgctgagcatcaacaagccgatgccgcacagcacacccagggacacacggtccgccagacgccccgcgaccagcgccatcaccgccaccaccgccggccatggcgtcatcaggaaaccggtttccacctggctgtggccgagcaccgcctgcaacaaaaacggcagtgacacaaaggccaggccctgggcgctgaaggcactcacagcagtcaaggaagacaaggcaaacaccgggcgcttgaacaggtcgagcgccagcatcggtgccgggtgcccggcctggcgccgcaacagcagcacaccgcagaccagtgccacggcaatcaggcccagcgtcagcgcaccctgggcaccgtgcaccgccgtgcccaggcccagcaccagcagggcgaacagcccggcgcacaacacggcggcaagccgatcgaaggcatgccccgtcatcggcagggtcggcaacgagcgcaagcccagccccaaggccaataaccccagtggcacgttgatcagatacaaccaatgccaggtcgccaccgacagaatcgccgacgcagccgtcggcccaagggtaaaggccaaccccaccaccaacgagttatagcccagcccgcgcccgagcatttttgacgggtagatatgccgcagcaacgccgtgttcacgctcatgatcgccgccgcacccagcccctgtgccacccgcgcagcggtcagggtgaccagcgatccggccaacccacaaaacagcgacgacacaataaacagcagcaaaccgccgaggtacacccggcgatgccccagcacatcactgagcgacgcaaacggcagcaccgtggcgataatcgccaactggtaggcattgaccacccagatcaccgaggcggaatcggtaccgatcccctcggccagggtcggcaatgccgtgttgacgatggccgtgtccagggtcgccatgccgattcccagggagatcgcgatcacggccggcaggcgtttattgaggggcaacccatcggcaacagaagacatgaacaatccgcccaggtgactaaggcggttagattaatggcagcggcgaatttattcagtggtggataggctacctgtcagtattttcatgttcgcgcccattgaaagagacctcctacattgtcccgctgcaatttttgcgagggtgacgttcctctgcccttacgagaaactcactgatggacaacgatcgtaaaaccgcgcattgcgatgcacgccggcattttctgcgcctggcggccaccagcgccggggctgtgcttctggcaggtcagttgccaatcgcctcggctcacgtggccgacacgccaaccagcattatcgacccgcagcaggcgttggcgcgattgatggagggtaacagccgctacgccgccgacgtgacaaagcgccgcgacctgatggtggagcgcgaggccttggtcagcggccagcatccgttcgcggcagtactcgcttgcgccgactcaaggattgcgcccgaatacatcttcgataccggcctgggcgaactgttttgcgtacgcgtagccggcaacttcgtgacggaaaacgggctcgccagcctcgaatacgccgttgcgatgctggggacgccattgatcctggtgttggggcatgacagctgcggcgccatttcggctggggtcaaggcggtcaaagacaacgtgaccttccccggtaaaatccagagcctggcggatgcgatcaagccttccgtgaacaaagtgctgaaagcgcccggcaacctgctcgacaacgccattgcgcaaaatgtccgggacaccgtggcacggctcaagggcgaatcaagcgtgctggccgacgcccttgcccaaggaaaactcagcattgtcggcggcacttaccgactgcgcagtggcaacgtggagttcctggcgtgatcaggtgcgccagtgcccagtcttcgccatcacccctaccgcctcggcaaaacccgcctggggcagcgtgttgagcgtgaccagccccacgcagcgtgtcggtttcagggtcgccgtgtgcgtcgccacgcgtgcgccctgctccacaccggccagcaccgcctcagggatatgcagcgcgttcatcagttccagcacatcctggccgagcgtggcgtcatcggcctcgcgcaggtacggcacgatcacccggaaaccttgcgccgccagcggcccgctgaccgccgcaaacacgctcacatccgccgccaacaagataatcgcgcggccctcctccggcccgaactgctcataacggacctccccttcatccgtgctcacctgttgcagcgcaaacgcaggggcggcgatcaccaccgacgccagcagtagaaaaccacgccgatcaaacatcactcacccccacgatcaattcactgcccagccaagcggccaggtattcacccgcctgcatgacgccggcctcttcccccaggcgctgcaccagcaattcacacagcccggcgaaactgccgtcagcctgtacgtgctgcaccgcctgaagctccagcgcatccatctgacgcagccgcgaggtgaattgccgccgccacaccagcaaaccgcccgcctgctccagcatcatcgcttgcggcgcgggcgtttcctgccacagcgccgaccagatggcctcggcattggtggtcaagtcgtggcaacgcaacgacggtgtgagctgcactaccgcggtgtcccagtccagctcggccagcgcttccagggccagcggttgcgcgtcagcggcgacaaaggcttcattcagggccgactcgatccacgccaactcatgcacatccggattgcgcgggaacacctccttcaaggtggtgtagaacccctcggggtacgcgtccagggtccaggcatggggcggatggttgtcgatgtgcgtaatgctcgcggccaggaacgcttcctctccaagccaacggcgcagggtggggaaagcctgttcgaggcagcccaccaactgggcgcggtagttgttctggtacaccgccagaccggtgtgattgctgcccagcaactctgcggattcatccgacgcggtcaccagccagctacgaaaagcctgctgaagttgcgccaggttcatcgcgctgcccccaacgtccgggccatcgacagttcctgaagcagctcggcgagcggcgggatctcatcatcgcgctcgatcatggtcgccaccggccccagccgggtcatggcctgggcgtacagttcccagacgccggtgcacaccgggctgtcatggctgtcgatcaagatgtcacggccctggctgtggccagccaggtgcacctggcgtactcgctcggcggggatgccgtcgagaaacgccagggcgtcgaaaccgtgattgctcgcactgacgaacacattgttgacgtccagcagcagctcacagccagtgcgccgggccatggccgtgatgaactcccactcggtcatggcggcaccctcgaacgccaggtaactcgacggattttcgaacagcatcgtacggcccagcacgtcctgggcctgatggatattggcgcagacccggtccagcgcttcgtcggtatagggcaccggcaataagtcatgggcattgaaaccgccactgcgcgaccagctcaggtggtcggagacaaacagcggttcaatttcatccaccagcgacttgaggcgccgcaggtaatcggtgtccagcccttcggcggtgccgatggacatggacacgccatgcagtgccaccgggtagcgctcgcgcacctggcgcaggatgtgccggggctggccgcccgcgaccatgaagttttcggagatcacttcgacaaaatccacgggcaccgaagtctccaggaagtcgcagtaatgctccttgcgcagccccaggccgtagcctgaaaagtgagggttggatgtcgacatgacggatctccgcaacgaataagtggcgagcccacacagggcccgccgggtggattacttcggttcggtcaaggtgccaccggccttgaggcactcggacggggtcttgacgatcacgccttcgcccttgcagctgttgagacccttacagtcgttcttggcggtggcacacaggctggtgcctttacaggtgttgacgccgtagcagcgcccgggtttttcctgttggtcggcggcgctggcggcgctgacgaatgaggccgaggccatggcaataagggcggcagcggcagcgaggctcaggcgggatttgagtgcagtgttcatgggtgtttctccagggttggggtgaattacttgataacggaagcagcgtcttcgatgaccttcgccacagcctcgggctgggagatgtacaccgagtggctggccttgatttcggtgaccttggaaccggcacgcttgtacatccagcgctgcaggtcggggctcagggcacggtcttcggtggagaccaccgcgtaggtcggctttttgtgccaggccgcggcccacacggtgccgccgaacagggcagtggtcgcgggcacctgggaggcggccatgaagtcggtgcggttggtggtcaggtcggcggcaaagtcggcgttgaacctggcacggtcgaagaacaggtgaccgtcgcggctctgcttgatgtcatcgctgggcgccggcatggagccgatcaactgggccatgttctcgcccacttccggttgcagcgccgacacgtagaccagcgacttgaccttgtcgcggtcgccggcaatcgagatcaccccgccaccggaactgtgacccaccagcaccaccgggccgacttgctgctccagcacttcgcgcgcctcggccacgtcggcggccaggttctcgtggccctggtgcaccaccgtgaccttgtagcccttgtgaatcaggatgtcgtgcaccacacgccagccggagccgtcgacaaacgaacctggcacgatcaccacgcttttaccggtgccgggctgcggggcatcagcggcctgggccagcatcggaacggtcagggccatggcaatggccagggaagaaagcatacgcattggaaatctccatcaaagttaagaacgtttgcccaggatcaggcggtccagcgaccaggccccaccgccatacgccagcagcggcaacagcaggcccgcccaggtcaggtgcaccggccaggcatcggggtacacaaacacctcgatcaccagagtcatgcccagcagcgcggaggcggccggacgggtcagcaggcccagcaccagcaacagcgggaacaggtgctcggcgtaggtcgccaggtgcgccgcccactccggcggaatcagcggcaaggcgtactccgagcggaacagcgtgtaggtcgacggcttgagttcaagaaacccggtgaccttggtgcgccccgacagaaagaacaccgccgcgatccccacccgggccaccagcaacagcagggcttcgggcagcaggcgctggatcacggctgctccgtgaggctgccgaagcctttaggggtcttgatctgggtgcaggtgcctttgtccaccagcacccaggcattgccctggtagtcggtggtggcggtgccagcacacgaggtgcctttgccggcggcgcagtcgttggcaccggcgagggacacgccaaagcatttttcctggggcttgggctcgtcggcgtgggccacggccgcgaaggcactgagggacagcgcaagggttgccgcgagggctgcgtaaggacgcttcataagatgagtctcctggcttgactgagtgtggccagggcgccttggaggtcggtgaccgcctgcgccagctggtgagcagagttaaagccaggcgtgtatccgctctgtgtcgcgaacgcgatagaacgtcatgcgggtgtatcagaatggtgcagggatacagttcgatacacagtcaataaaacagtgccaaaactccggcgctgtattcggcatcccgaacgacacaattagaaatattcgcctttccgaacgaaggctttttcgtgtcctcgacgaccacaaaaatcaccataaatttcatgcggttgttgtcatgtttgttacatgccaactggcatacattctgctttatccgtatttctggtaataaaatgtttcagccctgagacagtctcatcccctgaagcactacctgagacacaccataaaaacgaccacgccccaaaggagggcggcctctccgaccttttgatcgacatcaactttccaagactgctgctgcacatctgtaccccaaaaagggcgaacggcctgaacgccgataacaagcccgactataaaaaggacgatttgatgagctcgagcaagaaccacgcagtgtccttcctggatgcagaccaccccgcgccggctacccccgacagcaccctgggctttggcccctttctattactggccaagcaacatgtgttgttgcgcaacggcgaaccggtcaccctgggcagtcgcgcgctctacctgttgattgccctggtgacccgtgcgggggaactgctggagaaagccgaactgatcgccttcgcctggcccaaggtggtggtggaagaatgcaacctgcgcgcacagatcgtcgcactgcgccgggccctgggtgacgatggcaatttcagttatatcgtcaccgtgccgggccgcggctatcgttttgtcgcccccgtcaccgtactggcagccgctaaagagcacctgcccgtgccctatgtgcgaatggacgaacccaacccgccgacgccgacggcggaggtgatcggccgtgacgccttgatcgccagcctggcggaccaggtcatgagccagcgcttcgtcaccctcaccggccccggcggtatcggcaagaccaccgtggccatggccgtggcgcagcgcctggccggtgaactcaacctgggcacgtgctttgtcgacctggccccagccaccagcggccaatgggtggccggcatgctcgccagcgcattgggtatccagaccgtcagcgcagacccactgcactgtgtggtcgccagcctggccaaccgccgcttgctgctggtgctcgacaattgcgaacacgtactgccggccaccgccgacgcggtggaaaccctgctgcgcggcgccccgcaatgctgtgtgctgaccaccagccgcgaaccgctgcgtgcaaacggtgaacgggtgcacgacctggcgccgctggaggtgcccgacgcacacgcccacctcagcgcccagcaagccctggcctggtccggcgtgcgtctgtttgtggaacgcgtccgcgccctcgacccgagttttgtgttccacgacgccgacgtcgcggccgtcagtgcgatctgccgcaaactcgacagcaacgcgctggcgatcgaaatcgccgccgctcgtgtgcgcacctttggcgtccaggacctggtgggcctgctcgacggcagtttccgcctgcaaatgaccggccggcgtaccgccctcgcccggcaccgttccctgagcgcgaccctggactggacctacgccatgctcagtgacgacgaacaggccatgctgcgccagctcgcggtgttcaccggttccttcaccctggaggccgtcaaggcgatgactaccagcagccgcctggccccgcgcaacgccctgcccttgctcgaaagcctgatggacaagtcgctgctgatcgccagcgaatccaccgtgcccaagcgctaccgcctgctggaaaccacccgcgcctacgccttggaaaaactcaacgaacagggcgaaacccgcgccacctgccaacgtcacgcgcgctatgccctcggtatgttgcgcgaagccgggcgaaccctggatggcctgtcgccgggcacctggcttgccctctacgctgcggagatcaacaccattcgggccgccctcgaatgggcttactcgcccaccggcgacctgcccctgggcatcgagttgaccttgggcggcgtgccgttgtggctacgggtgtcgctggtcagcgagtgccgcagttgggtcgatagaggcctggccagcgacgccctcgtcccgctgcccttgcgccagcgcatgttgttgcagaccgccctggccagtgtgctgatgctcacctacggcaccggcggcccgatgcgcgaagcctggcgccaggtgtgcgaagacgcccgcgacctcggcgatgccgagcacaagctgcgcgccctgtggggcctgtggaccgaccgttgcggctgcaaccagtacaccgaagccctggaacttgccgagcgctatatcgcgctgaacagcagcggcagccaacaattgctcggcaaacgcatgcgcgccgtggcgctgttccacatgggcgacctgatgggtgcacggcagaacatcgatgaagccctgggctcgccgtcggcaccgcgctcgcacatcatcgacctgcacttcgaccaacgcatcgccgcccgttgcctcaaggccaaggtgcagctgcttgaaggcgacgtcgacccggcgctgcgcctgatcggcaactgcgtcgacgaagccatctccctcgaacaccccgcgaccctctggtacaccctgtgcctgggcgccatacccctggccctgctggcgtccaacctgccgaaagtgcgctattacctgggcctgttgcaagacagcaccaccggccaggacctgcacatttggcggcaatttcgcctgtgtttcgaaagtatcctgctgatccgcgaaggcgcgccggaaaccggcgtgccgcaactgggcgaagccttgcaccacctgcaaggccagggcgacagccagctgtacagcctgctgcgctgtgaatacgccctgggcctggcgcgcctgggcctggaaaaactcgccctggaagtgctggaagacaccctgcaattggccctcggccgccatgaacgctggttcgtgccgcaaatgctgcggatcaaggcacaactgaccttgcgccaggcgcactatggctcggtggacaaggccaccgtgctgctgcgccaggcgtgggtcgacgcgcagttggcgggcgcgcacttctggcgggcgcagatcgcgaccgacctggcgcgcctgcaagaacccaagctgcgcatcgcctccctgccgcgcttccagcaccgataaagtggcgagcagacttcctgtggcgagcgggcttgccccgcgctggggcgcgaagcgcccctaaaaccaggcgacccgtttccggctggagatatgcggtgactgggtttgagggtcagataaggcgagcagccaccagccagtccgccacggcctggaatgaagcatccggcaccggatcccccggcacggtcctgcgcgcgatctcagccgccaggcccttgtccggcgcatggggaatccccaggtcatacgcctcctgcagcatcaacaacgcctcctccggcgaagcccggcacacgatcaccggcaccggggtttccccgcgtacataacgcacgccaatcacccagccgtcggtggtgccgatcatcaaggacgcacggcccaagcccagcttagtcgccagggcctgcatctcattgcgctggcggcggcgttcgcttttgatcagcgggtcgccgtcgatgtccttgcgttcgcgcttggtctcactgcgggtcatcttcatgtcgcggccgaacagccagcgttgcatcatcacgtccacgccgcccaccaggatgaacgcgcacagcacggtgaacaccagcggcttgagcaccaggaaaaacgtcgaatccatgcactcggcaccgcagcgcgacgactccatcagcgcctgcaacgcatgcttgccgaccacgtagaacgcgattgccagcacgtgcaccttgatcaggcccttgatgaattccaccaggttgcgcagggcaaagatcttcttcatgccctccgccgggttgatgcgtttgaactcgggtttgatcgggtcggtcgagaacacaaagccgcgcatggtgatgatattggtcaggatcaccaccccagtggtcaccgccatcaccggcaaggtgatgccgatcaccagttgttcggcgtggtcgagcaccctgggccacacggtggcgaacggttcgatgtagatctgcgcggtgaggtcgatcagcgccgcgacctgggccttggcccgtggcgccagaatggaaatgcacagcgtacagaacaggatgaccatgcccgacaccaggtcctggctcttggcgacctggccctttttacgtgcgtcctggagcttcttgtccgtggccggctgggatttttcttcgctggtatcggccatgggctactccatgccggccagggtcttgagcagttcgacggtgccgcgaaactccgctagttggtcaagcatcagcgggatcaggaagccgatgtagatcaccatcaggatcgtgaaaaacaggtttttcaccggcagcgacaggtcgaagatatgcaggttcggcgccatgcgcgacaggtaggcgagcatcaggtcggtcaccagcagtgcgatcaacagcggcgagaccatcagcaccccgacgcgcatgatctggtcaaggatcgacaacaccgccagcagcgccgagctggcgaacaccggcgtgaacgaggtgaccggccagagctggtagctgtggtaatagccgtcgaccatcagaatgaaaccgccggacatgaagaacagcgtgatcagcatcaccgtgagcagggtcgccatcacgctggactccccggacgacaacgggtccaccagttgcgccatggtcgagccgcgttgcaggtcgatcaactcccccgccacctcggcggcccagaacggaatgccgaacagcaggccgatcaaaatgccaatcaggaattccttgatcagcaacccggcgataaacaggctgccgtgctccggcatcgaggtcagcgcgtcgaacaccgggaagaacatcgggatggaaatcgccacggccacacagccgcgaatcatgccggtgagccccaaccggttgaacgccggggtgatcaccaccacacccatggcacggcaggcggccagcgacgcggagctgatcaccgggtaggcgacttcgaggaactgcgcggtcaggctggcatccatgggcggtcagcgcgtccacatcgggaaattatccagcacctgaccaccgagttccgcgacttgtccggcgagaaccggaccgaggaacacgatggtcagcaacaccgccaccagcttcaccacctggggcaacgtctggtcctggatctgcgtcagcgcctggaacaggcccacgctcaaccccacgataatcgccacccccagtgccggcgcggagagcatcagcaccgtcatcagcgcctgtttcatcaatgacaggaatacgtcctggcccatgggtcgtgcctcagccgtaactcagaatcaaaccgtgcatcaagcgcgaccagccgctcagggacacgaataaaaagatcttcagcggaatggagatcaggttcggcgagaccatcgacatgcccatggccatcagcacgttggacaccagcaagtccaccaccaggaacgggatatagagcaaaaagccgatctcgaaggcgcgggtcagttccgagctgacgaacgccgggatcagcaccaccaagtcatcgtcacgcaggtcagtgcgtgcctcaggcgaccagatggtctcggtggcctgcacgaaaaaaccgcgttcggactcattggcgaagcgcttgaggtgcgcctgcaacggcggacgcaatgcgtcgcccaaatccttgagttgctccacatgctcgatgttgaggtcgcgcccctccacctgtcggtacatgtcgccaatcaacggggtggtcacgtacaccgacaggatcagcgcaatgccgtacagcaccaggttcggcggcgtctgttgcacgccaagggcgttgcggatcaggaacagcaccaccgagatcttcatgaacccggtgagtgtcaccaccgccagcgggatcagcccgatcgtcgcaacgaccaggatgatctcgatcaggttcggctgatagccggtcatggggtggcaaaactcagcaggcgcacccccaggccgtcaccgattttcaccagttggccctggccgacgcggcggccgttgaccatcaggtcgacgctgtccacgcccggcgtgttgagctgcaacaggctgccggcgcccagttcacgcaattgcgccagggtcagttccaggctgcccacctggcacaccagtttcaacagcaggtcatccagcgcaacggcggcatcaacatcggtcatggcgttctccggttcggcaaagggggcttgcaaggcttcctgcaggcgcaggacttcgccctggtattggcagcgcgcctgcaggcggccgtcgaggtcgagcaaaaggcccgggcctggttccagcatcagcacatcgccggggcgcaggctgcgcagttcgccgaggctcagccactggcgccccgccaccaccgccagggtctggcacaggcctggcaaggggtcgggttcgacctcggcgtattgcgccagcaactgcgcaaccagcaccgcggcgctttcgctcaggtccagctgggcgctcatcgcgggttggttgccgaaggtcaattccagcgccaaccgcagggcaaacacgccctgctcatcagcggtttcgagcacctgcaccgggtgaccgagcaacggttccaaggcttcgatcaggtcgagcagcgccagctccagcaacaacgcgcgcggcagcgcaggcaacggctgcacatcgaacggcagcgccagcggcagcgtcagttgctccagcgccgcagcagacagacgcaggcgcaccggggcacggcccagcgacagcaacacgtcacgcggcgcatcaaggctgtgcactgcggcggcccagctcacgcgcaggtcctgcccagcgcaacggccctgccaggggcggcgacggcgatgcagttggttgtgcagggccagcaatgccgggtcgtagtgggtcagccacggcgacagcgggtcggcaagggctgcgatcatatgccggtgccctcatcacgcaactcgccaacgcgacgctcatcgctttcgcggccttcgagcaggctttgccaggcgtcggactgacgctggcgactcagtcgctcctgacggaacagatcgcgttcgcgctcctggctttccaaggtgatggagacgtggctcacatcgttttccagttgctgctggtcatccgacaggccgcgcaagcgatcctgggcggcctgccaactggcgaccgacaggccttcggtcagggacgcataaacctgccgcgcttcctcggcaatcgcctcacggtgcaggcgcaattgctccttggcgtcggtcagcacaccgtgggtctgctcgcagcgttgctgctgcgcggccagttggctggcggcgcgttgttcgcgcaacacccgcagggtttgcagggtacgtagttgttcggttttcattgggctgtctccatgttcatgccgatacacacatcggtggtgagcctgcttgttgtggcgagcaggcttgtcctgcgttggggtgcggagcagccccttgtaaactcaccaggctcttccagataaaactcagcgcctggttttggggctgctgcgcagcccaacgcggggcaagcccgctcaccacaacaggcctacccagcacaacaggcccgctcaccacagcaagcccgctgactacaacaggcctgctcaccaccacaagtcggttcatgccaacacctggcgcatgcggttcagggtttgttccaggttgctcggctcatccgcgttctgacgcaggaaggcttcgatagcggcgtggcggttgatcgcttcatcggccaggggatcgctgccggcggagtactcccccacgcggatcagcatttcgatctcgccataccgcgccatcaattcacgcatgcgcatggccagtcgcttgtgttcttcaccggcgacctgctccatcaaacggctgcgactgcgcaacacatccaccgccggaaagtagttgcgctgggccaactcggcactcaacgcgatatgcccgtcgaggatcgaacgggcctcttcggccaccggatcactggcggcatcaccctcggtcagcacggtgtacagcgcggtaatgctgccgctggggccggggccggcgcgttccagcaaacgcggcaaggccgagaagaacgacggcggataaccgcgccgggtcggcggctcgcccacggccaggccgatctcgcgctgggcacgggcgaaacgtgtgaggctgtccatcaacagcaatacgttgcggccctggtcgcggtggtactcggccagggtggtagcgacaaacgccgcacgcacccgttcggcggccgggcggtccgacgtggcgaccaccgccaccgtgcgcgcacgcgcctgggcgtcaagctgcacatcgagcaattcgcgcacttcgcggccacgctcgccgatcaggccgatcacgatcacatcggcttcactgttgcggatgatgctggcgagcagcgacgacttgcccacaccgggctcaccgaagatgcccatgcgttggccctgggccagggtcagcaggccatcgatggagcgaatgcccaatgccatggagcgcacgatcagctgccgcgaaaacgctgccggcggttcagcgtgcagcgggtaatgctgcaacgctacggtcggcggaacgccgtcgccgtcgaggaaatcgcccatggggctgatgacccggccgagctgcgcatccccgacggccacgcccagggtttcgccggtggcggtgatttgggtgcgcgtggacaggccttccatggagccgatgggcgacaggatggcttcgtcgccgtcaaaaccgatcacctcggcgctcaggctgcgcgcgctgccggggtcgcgcagctggcacagttcaccgatgctcgccccggccacgctggcgcgcagcaatacaccgcgaatactcagcacggtgccgtgcatgggtcgcgggcgcgcctgggccaggcgttcggtgaggcgtggcagcaggtgttccaggttcatgccacgccctcttcggcgaagggcaacaagctgcgacgcaggttctgcaattgggcttcaaggcccagttccacagagccggccgggctgttcaggcgggcctggccggcgctcagctgttcatccgcatccactgcaatcgccagcccctccaacttgaggcgttggcgcaaggcatccacgtccgccggcggcacccacagggtcagggcctggtcctggcgaaacgcgctcaacgcctggcgggtactgcgcactacgcggtcggccgtgtccaactcacccagcacttcgcgcacgatacccagggccaggtcgaccagggacgtttccagactgctcaagtaatgctgcacctgggcttgggtagcgagcagcagttgcgccacctgttcagcaccggcttgccgggcgctttcgaaaccctctgcgcgggcgctgctcagccattgctcgctgtcggcgcggatctgctcggcctgcgccttggccgcctgcaggaaggcaaaaccatcgctccatagcgcggcgtcttcggcgcgcaggatgcgggcggtggggcggcttggcaattcagtcatggcgtgatctcctcggccagcaggcacgcggcggcggcctggacgatttccaggtcgcgtggcacacgggcgctgtggccctgggggaaggcaaagcgcaaacgcagccagccctgccagtcggcatgctgggcgtgcaaccaggccgcgacgcaaccttggccatcgcggtcgatggcgtcgaccaactcggccggctcgcgcagcagatccgccgcgccaccgagttggcgcaaggccagggcgctcacgaagacttcagcgcccaggccttcgcgcaattcattgaccacttcgcgacggatctcgcggctcagggtcggggcatgccagatggcgccgcacaaccttggcaagcgggcaaactgtgtcggcgacagcaacagcaccgccaagtctgccgccattggcgtggtcaattgcgccatgggcgccagttgatactggctgaccagcaactgctccaggcgctggcgaaagcgtggctggccctgcatcgcctgcagcacggcgtctggcaattcatcggcaaaacatgcacccaggctcggcccgcgcacaaaccgcagcggctcggcaatcagcccctgccagcgttcgaacaaactcattcaccctccttgagcacatacaacgcctgggactgacgacgtgcccactgctgacgggcgagcacacccaccgcaccgagtgcgatcagcaacaaggcgccgaacatcagccgcgcctgggccaggttgtcttccagcagccacaggcccatgaaccgcgccaggcgcggctgcgccgggttctgactgatggcgacggcggccttgatcgcggtcaccgaaacgccgtcgtaactcaacccggagatgccgttggcgaccagcgtcttgatctgcgggatcagcgtattgatatcggtgtccgggtcgtaacgcaccagcaccgaggccgacgatggtgaaatcacgcgcttgagcaggtcattgtccggcagcaccacgtgcacgcgggcggcgacgatgccgtcgatctgcgacaccgagtgcgacagctcttcgctgagcgcatagatcatctgcgcccgctcctgcaccggcgacgacaccaggccgttgcccttgaacacttcgcccatgttggaaaagctctgctgcggcaggccggcgttgtcaagcagggtcatggcttcggcaaagcgtgactcatccaccaccaccttgagctggccgttgtcctgggccttgcgttcggccgggacgccaccgcgcagcagtaccgcgaccatggcattggcgtcgcgctcgctgaggttggtgtagaggtcggtgttgcacgcctgcaacaggctggcgagcaggccgatcagcaacaggcgcagggcgcggtttgggcttggcatacggttattgacccttgagcagcgtgttggcggaaccggaaatctgtgtcgcaccgcgcaccaccatctgggtttcgatggagtaatcgaacatcttgcccagggagtgaacgatctggtcgacctgttgctcgccgacttttttccccggttcaccctggggcgaagcactggcggtgcggatttctgcctgggccggcggcggtgccgaaggattgttggtgagcaggtcggcccgttcggagaaagcccgcgtacggtcgatgaaactgttcatgcgctccatcaggcccgagccgatctggtgcgggctggcgccttcgggcatgcccttggcggtgttggccatgtgctcgaacaggttctgcgaggccccggcgggccccgcgccggcagacggcggcaacgccgaagcaccggcagcgagactgatagtcataggggtttcctactcttcgtcgtcatcggacatggcgtcgttcagcagttcctgcatcttcggcatgatgatgaactggccgccataggtgaccgcctgggtgatgaacgaatcggtgagttcggcgtcggtgggctcgttaggtttatcggcggtcttggcgttttccaccgccgcattgaacttggcttcagggctggcgccaccaggggtgggattgctgtctacggccgttacggacatggtgctgctcctttactgggttggggtttcggtactgacttgcgcgccacggaacacccgcaccccgcgctcgcgcgccaccggggcggcggcgaccttgggttgcaggtgatccacatgctgctgcaccagcgccaggtacggcggtggtccggacacgaacacttcatcgccctcggggccgttgcgcatcgacaactgctggccgaacacatcgaggttgttgaggtaggcctgcaactggtcgaggtccagggcgttggccttgaagagcttggtgctgatttcatcgctggcgttgaggtacaagaggttgccgtcgaagtaccaggtgaggccgttggtgctgcacagggtttgcaggaactccccggcggtggccgcgcgaatcgtgctgcgagccttgccgcggaccttgtcggagagcaccagcggcacatcgaggttatgcccgaattcttccagggcactgcgtacatcctggtccaccagtacgtaggcgtacggctgggagaaccaggcaggttcttcggcagcgtgggcgaaactggcgctgaacaggcataggacagccatcaaaaatatgcttacatggcctccgccttcgccagacgagttgtgacgatgacccctagatttctgctcgccagtaccctgctgctggccgcctgcgcccaccagcctgcgaccgatgccgacaagtccctgcaactggccaacgacctgagcaagcgcggcgactacgccagtgcggcagcgctgtacgagcgggcggcgcagcaacccggcgcgggtatcgagctgtggctcaagctcggccaggccaagctcgacgccaaggatgcggcgggcgccgagcgtgcgttccagcaggccctggggttcgatgcgcgcaatgccgaggccctgctcggcctgggcaccgcgcaattgcaagtgggcaagacccagcgcgccgccaccgccctgggccaggcggccgagatcagcggcttgccggttgcctacacccgcctgggtgtcgcgcagatcctcaatggccaggccgctgcggcgcaaaccgcgttcgccaagagcctgagcctcaagcccgacgacctcgacaaccgctgcaacctggccctggcgtatgcgctgggtgggcagtcgcagcaggcgctggacaccatcacccccgtcgcccagtcgccccgcgcattggcgcggcatcagcgtaatgagttgttggtgatggtattggcggggtacgaaggccgcgtcgctgcgctgccgttggacgatattcccgcagccgagcgggcgcggttggtggatgaagccaagcggatcagggcgatcagtgatcccgtggcgcaggctcgggagttggggttggtggatccgcgctgaatctgctgcagatgacttttctgtggcgagcaggcctgttgtggtgagcaggcttgccccgcgttggggcgcgaagcggcccctgtcaaattcaccgcattccaacagacagttctcagcgcctggttttggggctgcttcgcagcccaacgcggggcaagcccgctcaccacaggaagcccgctcgccacaacaggcccgctcaccagtataggcctgctccccacagcaagcccgctcgccacagcaaggaacacaggtcattgcttgccccctgacgcatcagccttggcttcctgctggtccttgcgacgctgcaattgctcgcggtcgaacccttcgatgtacacctgggcagcgcggcctacgggcgcggccatggccgggccggtggcgcggccttgggtcaggtcctgcttgcgctcgaccatttgcatcaggttcaaattgttcgcacagccaagcgccaacgtcggtttgaaatcctcacccaacccgacggtgtccgtcgccgggggttgctggcactgggtcggcaagccatcggcgcggtattcggacgagtaatacgtcggcgccaggtgggtctggcaacccatcagcgccaggggcaacagcagcaacacacgtaaaacagtcatggcaggccccttgatcaattcatgtagaaaccgaacgccccgccgctgcgcggtccggtggccgctgcggtagccggtggtgcgtcgaggggcgtggcgaggttgcgaccgcgcaccggctccaccaggtacggcgtaatcaggatcaccagttcggtttcattgcgctggaagcgcttggagcggaacaggttgccgaggatcggcaggtcgcccagcagtggcagtttctcgatgtcctggctgctttggcgctggaacaggccggcgatggcgaaagtctgcccgctgccgacttccacccgggtatcggcacgacgcacgctgaaggacggcacatggaaatggccgaaatccacggtgccgccgctgaccacctggctgacttccgggcgcacttgcaaggctatgcggccgttgggcagcagggtcgggttgaacaacagcgacacgccgaacgacttgtattcgatgcccaccaggtcgcggttgaccggcaccggtatcgccacttcgccaccggcgaggaagctggcggtctggccggtcatggcggtgatgttcggctcggcgagaatctgcagcacgccgttggcctgcaaggcgtcgagcatgccgtcgatattcacattgccggagcctgcgcctgcagcggccaagccccccgccgacgctgctgccaacgggccaccggtgatcaggccgaacgagaacgtgccgttgttgaacatcgcattccagttcacgccgtagtgcagcaactccgaacgcgacacctcggcaaagcgcacccgcaggttcacctgggcggagcctgcatattcagtggtgttgatcgcgctctggaaaccctgcccctggggattgagcagcgcgttcaggtctgtggcttccgccaccgagcctacggtgcctttggcgatcagacggttaccggcaccgctgatctgcgcagcgttgccgggatgcaatgcctgcatcggcgccgtcaccgcctggctggcgctgctgacggccagactcaggttcgccagttgcttaccgtcactgccgagggcgatcaggctggtgttgcccggcgccttgccgaagatgtagatcgtgcccggtgacaccacctgcaagtcggccacattcggttcggccaccagcaccgtgtccacgggagcgacaaaatgcaggatgcgcccttcaccggaggccagggcgatagagccaccggcgccggcggcgatttcctgagcctggctcacgcacgaaaaaacactcagcaacaatacacaaaaacgcatcatgaggcagacgccagggcagtgacggaagccgcggcaggcgcgcggcgattggaaatctcggtcaggctgatggtcaccagcgcttgcaagttgtactcggtggccagctcgcggaacgacagcaccgccagttccagctcgccgcgcaccaccaggcgacgcaggctgcggcgcagttccgggtgcaccagcaacaccgcgctgttgacctcgcgggtgtgctcgcaggcctggcgcagttgggtgagcaaggcgcggctgacgtcctcggggatcaactcgcgctgcggttcctggcgacgcagggcgccgcgcaactggtcttccaggcccggcgccagcaccagcgcaccgatcacccggttgcggtcggcgtactgatggctgatctgccgggccaacgcggcgcgcaggtgttcggccaggcgcccggcatcggtttcacgggcgccccactccaccatggcttcgagcaaggcacgctggttgcggatcgacacaccttcgccgaccagcaaacgcagggtttctgcgacccgttgcaacggcaccaggcgcagggcttccttgaccagttcgccgtaggtggcctcggtgcgctccagcagcaggcgggtttcctggatgccgaggaagtcggcagcgtagcggcgcaggctgcgttccagcacaccgcgcaacacctcgtcgggcagcaggaaaccgatgccggcgttgcgcaacgtgtcttcgtgctggcgctcgacccagtgggcgttgcggcccgtgagcggcgagtcggcctgcaccgtggcgaggtcgagcaactgcacgtgcaccgggtcgtcctgcaccagcaggcagttgatcggcaactcgccttcgctgaccggcacgccttccagggacacgcggaaactgcccggtgtagccttggcctccatgtagatgcctggtaccggtacgtcgacgccgagttcggtgcgcaagtcgtggcacagcgcttcgacgcgttggcgcagcagttggcgcggcgcgctttgggacacgccgctgccgatggtcagcagcacgcgggcgtcgggcagcaggttgtcatccagttcggcctggacttcgaccaccggctccggcgtctcgaccaacacttcaagttccggctggcggtgatgccggcgatacatcatgaacgccgcaccgccgaacaccagggacaagccgaggaacacccaggtcggaaaccccggcaacaggctcacgccgatcatgatcaacgcggtcaaccccagtgcacggtagctggcgcccagttgcttgatgatctcgctgcccaggtcccccgcttcaccgtcgctgttgacacgggtgaccacggtgcccgccgccaccgaaatcagcagcgccgggatctgtgcgatcaggccgtcgcccacggtgagcaacgagtaggtgtgcaccgcgacgccgaacggcatgtcgcgctcgatcatgccgatcagcatgccgcccagcaggttgaccgccaggatcaccaggccggcgatggcatcgcccttcacgaatttcatggcgccgtccatcgcgccgaacatctggctttcgcgctccaggcgtgaacgccggcgccgggcttcggcctggtcgatatcgccgttgcgcaagtcgttgtcgatgctcatctgcttgcccggcatcgcgtccagggtgaagcgcgcggccacttccgctacgcgctcggcgcccttggtgatcaccacgaactgcgccacggtgatgatcaggaacaccaccatgcccaccaccacttgcccggcgatcacaaagtcgccgaaggccttgacgatatgcccggcatcgccgtgcagcaggatcaagcgcgtggtggtgatcgacagcgacaggcgaaacagcgtgctgagcaggatcagcggcggaagcgcggagaactccaccgaatggccgatgtagaacgccacgatcaggatcaggatgctcagggcgatattgaggccgatcagcgcgtccaccaggtaggtgggcagcgggatgatcatcatcacaatcgccatcagcatgaacgcgacgatgatcacgtcggtacgctgcgcagccaggcgcgccaggttgttcaggcggttgagtgcactcatgcgccggccctgcgtgcggccaggtagcgtttgaagcactggcgcgcgtcgtccttgcgttcgccgtaccacaaggcgcgggcgcgcagcagcaacaggctggcggactcgccttccagcgccaccagacggtcgagggcgccgagggcgcgagtcgcgtcgccgctgtcggtgaaggccagcaccagcgagcgcagcaacgcgccgtcatcgggagcgacgttgaccgcgatcagcagcatcaccagggcgcgttgggactggccattgcgccggtacagctcgccgatgcccttgagcagttgcacggcgtcgtcgttatcgcgagccatcaggcatgtacctccgagcgttgctgtgcgagggtgcggcgcatctcgatttcttcaccgatcagctcgacggccagttgcttgatgtgtggctcggtgtccaggctgggcaggatgtgttccatcacatgctccagcagctccagggaacgggcgctgccgaacagcagcgagtcgacgccggcggcgctggtgagttcttcgaggtcactgcgcagggagcggcgagtctgggtcttgcgggtcttgagcaccgcttcgaaagcggtggcctggcgcgaattgaccgggcgcacggcttcgaccggggcgctgcgtacgtcactggggatcaacgggcggggttcgactttcatcccagggccttagcttaaaagcatggtcacaacgtgaaggtgaagcgctcctcgccacgggcgaggatcacttggttgttttcgatgcgttccagcacccagttgtccgccagtgccgcgccggggtacaggcgcttgccgctgtcgttgatcacatagggatgagggccgaaccacacggcctggaagcgcacgcgcggcgccgccgcatcggcccgcgcggtgacacgcgggttgagcacgatctgctggccgtaacgctggtcgaaggctcgctgcaccgccagccactgcagtttttgcgactgttcgaaggtgccggtggcgctgagctggccgttgctgttactgactttcaccgtgtccagctgggcggcttgcagctgctgctccagccaggccttggcctgctcgcgggaaggttttttcagcggcgcaacgtcggccacggcggttgtcggcagcagcggtgcttcactgcgaaacgccagcgctccagcacagataaacagcagtgcggtcgcgacgatccagggggtcaatttgcgtggcgcgggcacgggtttttcagcaccgcccggcattgccaggctcacccccgccgtgccgatgcgcagctgcaccggcagccgcgcgcgatgaccgttgccttggggaatgcgcacattgccggcgatcaatacgtcaccgcccaaggcttcgaccgccacctggccgccttcaaaacgcaggcgcaggtgcaggccggcaatgccgggatcgctgagcaccagatcagccgccagatcggcgccaatggtgtagacaggctggtcgagcaccagggaactgccctgatgcaaaccgccggtcaccgtcagggtcggcgcgccagttgcggcgaacggacccagggaaatcagggctgtcatagtcgggtttgcccccttgagcctgtgcaacggggtcaagaatcaggataaaaacgggacttgaggggtaaacgggcagcgccggcgctgcccgtttggcgaatcagttctgcggacgctgtttggtggcgtccagctccgcttttttcgcggtgctgatttcggtgatcttggccgacttctcgatagccatgttgaaggtcgcttccatcttcgcgatagcgtcgtcggcgccgccggcttttactggtgggacatcagccatgttcatctccttgcatcgatagggaagttattcagttgcgcaacagcacgctgaaagtatgcaaaccggtgaaggcccaaaacgtcagacagtgaaccttcgaatcgccgttggtttgcatggaatccatactactcacgatcaaaacgccttcgctgtgaaagcttgtgaaacgtttcagacaggcactgtgaaaggtgtagctcaacctggcattgaaaaaaactcatcgccggagcggcatggaacttttagcagaaaccaaaaacacgccacaggccccgatttacggggactcacctactgtttacagaacgaagctgaacaataaacctcgatggagacgcccggcacagcgctgctcggcaattattttcgcgacaacgtcacatttttcgctaatagccttttgcccaacttccagggtatttcgatttgtaacaacagcgacttaatcatcgcgtttgataggcctcccccaacaacctaattgcggggggagcaactttccgccgtgcctgttagtgcaactgcactaataaccaaaggacgcgtttgcaggccggctatatatgaaccttccaggtgatctatgaccgacatgaattattcacccccaactttccttgaagacgacggttgcgttgagattcacttcggcccttatcgactgctgcccaagcgccaccaactgctcaggcatggccagccggtaaaccttggcagccgcgccctgaccctgctgatcgccctggcctcgcggcccggtgaattgctgcagaaaaccgaactgctggacatcgcctggccgaaactggtggtggaggaatgcaacctgcgcacgcagatcaagacgctgcgccgcacactgggcgatgacgatgtgccgtacatcgccacggcagcgggcatgggctatcgttttgtcgcgcccacctggttcgagcgggcggcgcacccgcgggcgatgaggccgtcgggtggtggcggtgaacgtgtggcgggcggcttggtttagctcagggcgctcaggtccagatgcccatccttgatcggcgggcaccagtagtaaccaccggtcaagggggtgctgatgcggtacagaccatcgacaatcccatcctccaacccgctcatgcggcgcagttgcgcttcgaacgcatcgaaggaatgcccgaacgcgaggaacatcaaccctgcctggccattctcggcccatggcatggagcgacgtaccacgaaggcttccggcgtgaagctttcctgggcggtgcgcttggtgtgggcggactcgggagcgtcgtcgagttcttcgttgtcgccgtggcggcgaccgatgatgtggtcgcgctcctgagccggcagcgcagcgaagccatcgaggtcatgctgccattgctggagcgcggcaaagctggcgccgctgtcggtcagggcggcttcaaccgcggcgtcgtcgtgggggttttcggtgccgtcttcgtagtcggtgaggtcgaagccggtcttgtagcggaaaccttcggtcatctgcaccaggcgaaatgccggggccagggccttttcaaaggcacggctgcgcaatagcaattcaccgcgatcctcgccatgcagccacacccacagagcttgctgagtggacggattgtgtgcgcccggcccgctgactgccggaaaactgcgcaagccttcaacgcgtgtgcccagtgcggtgaccaacggctcgcccagaccgaccactgccgccgagtcgaccagttgcaccagcgcgtccagcgcagcaggcacggcggccagggcctccacggcaaaaaacagatggcgtgcctgcaacggcaccggtgcggcaagaatgcccggctggtactgactcatgtgaactccttctgaaaagccgcgcagtttaaccgccgggctcagccatgcgtactagaaagcgcgcaagccttgccatagagcctgttgttgggtgactctctagtcatgttttgcaactattccaggggtagcgccatgaccaccagcaacctgctcgctcagctgtttcccgcctccgccgccgcagttcccaagcaattccagctcggagcgcccattgaacagcgtgattacctggtcgacggccagttgcaggtgtggaacggccccttggccaaggtacaaagcccggtgcagtttggcgacgagcgcgtgcatatcggcagcacaccgctgctggacgccgagaccgcccttaccgcactggatgctgccgtgcgtgcctatgaccggggccagggtgaatggccgacaatgcgcgtggccgagcgcatccagcatgtcgaagcgttcctgcggcgcatgcgtgaacaacgcgacgcagtggtcaagctgctgatgtgggagatcggcaagaacctcaaggactcgcagaaagaattcgaccgcacctgcgactacatcaccgacaccatcaacgcgctcaaggaactcgaccgtcgctccagccgcttcgagctggagcaggacacccttggccagatccgccgcgtaccgctgggcgtggcgctgtgcatgggcccctacaactacccgctgaatgaaaccttcaccacgctgatcccggcccttatcatgggcaacaccgtggtgttcaagccggccaagcttggcgtgctgctgatccgtccgttgctggaggcgttccgcgacagcttcccggccggggtaatcaacgtgatctacggcagcggccgcgaaaccgtcagtgcgctgatggccagcggcaagatcgatatctttgcgttcatcggcaccaacaaggccgccagcgacctgaaaaaactgcacccgaaaccgcaccgcctgcgcgcggcattgggcctggatgcaaaaaaccccggtatcgtgctgcccgaggtggacctggacaatgcggtcagcgaagcgctcaccggctcgttgtcgttcaacggccagcgctgcaccgcgctgaaaatcctcttcgtgcatgaagacgtggtcgaccgctttatcgagaaattcaaccagaagctgaccacgcttaaacctggcatgccgtgggaagacggcgtggcgctgacgccattgcctgaaatgggcaaggtggattacctcaacggcctggtggccgatgccgcgcaacacggcgccaaggtggtgaatgaggatggcggtgaaagccgtggttcgttcttctacccggcggtgctgtacccggtgaacccgcagatgcgcgtgtaccacgaggaacagttcggcccggtggtgccgatcgtgccgtaccgcgacctggagacggtgatcgactacgtgctggactcggacttcggccagcaactgagcctcttcggcaccaacgccgtggaagtcggacgcctggtggacaccttcgccaaccaagtcggccgcatcaatatcaacgcccagtgccagcgcggcccggacaccttcccgttcaacggccgcaagaactcggccgagggcacgctgtcggtgcatgacgcgttgcgcgtgttctcgatccgcaccctggtggcgaccaagttccaggagagcaacaaggcgctggtcagtgacatattgcgcaaccgcgattcaagtttcttgaccaccgattacattttctgaaaacgacacacccaaatgtgggaggggcatgcccccttccacatttgggccgcgtaaccctgaatttcgaggccactttactaccgatgaacctgcccttcttcgcccggcgcctgttgcgcccgttgctcgacccgtatcgccgctaccgccatgccaagctgatccatgccgtgcgggtctccatcggcttgctggcaacgatcctgctgactaccggcatcaacctgccccacggtgagtgggcgtcggtgaccatgctgatcgtgatcggtggcttgcagcaccacggcaatattggcaagaaagccgtggaacgcgcctacggcaccttgatcggcgccagcgtcggcttgttgctggtggtgcagcaggcctacttcggccagcccttcctgacctacctgttgatgtcggcggtgtgcgggttcttttcctatcacgccatcggcaagggcggctacatcgccctgttgtcggcgatcacggtgtttatcgtcgcaggccacggggacaacccgatctccgatgggctatggcgcaccgtggacatcctgatcggcattgtgctggccttggcgttctcgttcgccctgccgctgtatgccgtgtactcgtggcgctacaacctggccagtgcgttgcgcgattgtgcggcgatctacagccggatcatcaatggccagtcggtcaccgatgacgagcacctcaaattgctcaatcgcttgaacgcggcgatgctgcaactgcgttcgttgatgccgtcggtgtccaaggaagtgcggatttccatgaccgagctggacgcgatccagcggcatttgcgcatgtgcatcagcaccctggagattcttggcaatacccggcccgatccacgagatgaacaggcgatggcgcggatgcaggtgatgttgagggccgaacatcggcaaattcgggtgcagttggtggggatggcgcgggcgttgaagtcgggggtgacggagcggttggagcggcccagccctatcacgggcaccgagccagcactggatgcgccagtctacagcgcgctggatggctatcggttgttgacggtacaactggcggcaaacgtggatgcgatgcgccaacgcctggccaaaagtgccgggcactggaagatctagagaggtggcctgttgccgtgtttaccaacgtcaacactttcacactttctcttacatatttttcacgttttattcacatcccggaacgtagggtgaagcctcatccgttacaaatgttgcatatcaagcccgccgccccagcgggcttttttttgcctcggatttgacctagcgggacgccttgacggcgggggctgtcgcttgttcgcgaatggcccgctgggtatccagtaccttggccaatgcggtttccgcttccgggctttgctgtggcacacgaatcgccgccgacaccagggtgatcaacttggccatcacctcggcatccgtcgccgggcggcccaggctcatggagttcatcagcaggcgcagctcggtgccggccatcaccccggaaatcgccttgagggcaaattgcaggcgcacccccagttcattgcgcggcaggtccggcaaggccagggcgaaggcttcgaagaaacgctggaacaccggctggtaatgcaccttgaggtattcctggataaacggcgaggtgtcgctgtagacccgccccaggaagcgaatgaacgaacgcccttccccactggcgctggccgggtcgctgcgctccaggcccatggccggggcaaacagcacgccgagcaaggtgtcgcagtccagtgggccgtcggactcggcttcacaccgcgccaacagttccaggcgctgctcgttgagcggctccaggcgctgcttgagcagggtttgcatcagggagtccttgtccccgaagtggtagttcaccgccgccaggttgacctgggcacgctcggtaatctgccgtaacaaaaccgcgtcatatccgtacttgatgaagagagcctctgtcgcatccagcaatcgagtcttggtaatgtttggagcgctgactttcttcgcgaccatagaagttccacgtgggaaatattgttttaaaaaataatttgattttttataccggggccgccgcctgaaagcaagtagtgacactgcgccatatgatcaaaagcctgtgcccacgggctcgttcaggctggtcgaacggtttttgagcggactgcgacgcccttgaggaaatcgtttcaaaggatgaaaccgctctatatccatggctggcgaagcagcaggaacacggttagtattcaaacaatattttaaaaacaagaaataaaaccagtccgtgacgcacgccaggccgctcccgaacttgtaacaatgcttttccggggaccgcacggcatcgtcgagactgcaggcgtagtcatgatgacagatacccccgcgcacccaggcttgatctccctgcaaggcatcggcaaaagctatcagctggccgggcaacacctggccattctcaatgatgtgtgcctgtccatcgccagtggcgacagctgcggcatcctcggtgcctcgggttcgggcaaaagtacccttctgaacatccttggcctgctggacctgcccaactgcggtcagtaccacttcgccggccacgatattttcaacgccacaccggaccagttggccgccatccgcaaccagcagatcggcttcgtgttccagagtttcaacctgctgccgcgcctcagcgccctggacaacgttgccctgcccttgagttatcgcggcgtatcacggcatgagtcagtggaacaggccctgcgcatgctggagcaggtcggcctggccgaccgcgcccaccaccgccccgccgacctatccggcggccagcgccaacgggtcgccatcgcgcgggcactggtgggcaacccgtcggtgatcctcgccgacgaacccaccggcaacctcgacagcaccaccgcacaggagatcatggacctgctgctggcgttgaaccgcgaacagcaagtcacgctgatcatcgtcacccacgacccgcatatcgccgagcgcctggaacgcaagatcctagtgcgcaatggcgtggtgcaagaggcccgaagcctatgagcttgcgggtcgaacaaagcctcagccagctgctgcatgaagcgttcgtcagcctgcgcaccctgggcaagcgttcggtcctggccttgctgggcatcgtcatcggcagttcgtcggtggtggcgttgatcaacatcgggcataacgcggcagtggatgcggcaatgatcttcaaggacatgggcaccgacaccctgatcgcccagttcccagccaaaggcggtagcagcatcccgatgcccgcccgcctcgacctcgatgccgtgcgccaaaccgtgccgggcattgcccatatcggcgccctcacgctgttcagcgggccgatcgtgttccacggccgcaccaccaacgccaacttcgtcggcagcacgccagacatcaaggacgcgatgcgcctggtgatacagcaggggcgcttcctgtcgagcttcgatgccaacgaaacctacggcgtgatcggcgaccaactggcccaggcgctcggtgcgccaggtgaccccctgcaactgggcgaccgcgtgcgcatcaacgactacctgttcctgatcgtcggcatcctgcgcagccagccccgggcgatgctgatgccggtgcaggccaatgagtcgctgttcatccccgccgaaggcatgcgccgcatctatgccacaccgcagatcggcaatgtgatcatccgcgccacacccggccaggacatggagcgccttgccaaggacgtggctgccgccttgagctcgcagctcgccgaccacgatgcagacatccaggtgccccagcaaatgatcgacggcatgacccggcaaagccgcaccttcgcctatctgctgctggccctgggggcgatctccctggtgggcggtggcgtcggggtgatgaacgtgatgctgatgaacgtctcggagcgccgtcgcgagatcggcattcgcatggccctgggtgcgcgccaacgcgacatccgcaacctgttcctgctcgaagccgtgaccctcaccgccgtcggtgccctgtgtggcgccgtgctgggcatgacggcggcctggttgtacgcctggctgtcgggctgggaatttgccctggcggtcgccgccttgccgctgggggtgggcagcacgttgctggtggggttgttcttcggcatctacccggcggtctcggcctcgcggttgcaaccggtggaggccctgcgcgatgagtaaatggctatggctgctcgcattcgccagcctgcccggcatggccgccgatgtggtgatcaagccctcggcccccagcaccacccgcagcggctacgagcgcagcgtgtcgttgaacgcccagaccaccgccatgaccctcggggatgcggtgtacctgggcctgcgcaacaacccggcgatccgcagcgcgtacctgcaacgggtggcccagaagttcgacctgcgcgtggccgaagatgtgttcaaccccaaactcaccctcaacagttactaccgcagcacccggggctccgccgacagtgcgcgcaatgccaacgtggcgcccgccaccagcctgctcggcgagtacggcacgcgcctgagcatggcctggacccagcaactgagcaacgccgaccgcgccggtcgctaccgcagcgacggcctggacctggcagtcatccaaccgctgctgcgtggcgccggctgggacgccaccaccgcgccgctgcgcctgtcacgcctgtcggaacaggccaaccgccttaacctcaaggccactgtggcgcagaccatcagccagatcatcgccacctaccgcgaactgctgcgcgcccaggagcaactgagcatcgtgcaggatgcgctcaagcgttccggcaccttgctggacgtgaacaaggcgctgatcagtgccgggcgcatggccgaattcgaaatcgtgcagaccgaagccgacatcgccacccagcaactgggcgtggaggaagcgcagaaccaactggacaccagccgcctcgccctgctgcgcctgctggcgctggacctgtccacgccgattcgcgccaccgaagccctggaggccaggcccatgcagatcgacaagcgccaggccttcaccctggcgcagacccagcaacccgaatacctcgccgccctgctcggcagccaacaggccgacctcaacttggtgatcgccaaggactcggggcgctggcaagtggacctggtggccggcgctaaccaggtgcgcgccaacaccgacaacgacgcgggccgttccaacaaccgtacctgggacagctacgccggggtgcaggtgcagattcccatcggcgatatcagcacgcgccaggccgaagtgcgcgcacgggtgaatgtggaggaccaggccatccgcatcaccgatgcgcgccaggaattggaacgcagcgtcaacgatgtggtgcgtgaccttggtacgcgctggcgccagtatgaaatctcccagcgcgccgtggaattgtcgcggcgcaagatcgaaatcgagcgggaaaaactcagcgccgggcgctccaccaacttccaggtgctgagcttcgagaccgatttgcgcaacgccgaaaacgcgcaactgaatgcgctgatcgcttatttgaacgcccagactcagctcgacttgaccctgggcatgacgctggaaagttgggaaatcgccctcaatgactactaatcagaaacgcctgctgggtgttgtgttgatcgtcctgctcggcggcgcgggcctggccttgcgcagcccggcgtccgatccaggcgctgccagcgaacagtggctggccgtcaagcccgaggcgctggagcaccggatcggcctggtaggcaagatcgagcccgacaccaccatcaccctcaccgcgcccttcgatggcaacgtgcaagccaacctggtggaacaaggccagcgggtcgaggccgggcaggtgctgttgcgcatggacccggccacgctggaggtgcaattgcgcgaagcgctttccgcccagctcaaggcccggcgcaccgtgcaagagatgcaggactgggacagtagccccgccgtcagccgcgcccgccgcagcctgcgcaccgccgaaatgaccgccggcaacacccagcgcaaactcaccgaaagcgaaaacctgttcaagcgcggcatcatcccgcgcaatgaactggacgacctcaagcaacagacccagcagcaacagctggaccttgcctcggcccgcagcgaactgcaacaggccatcgaccagggcaagggcgagtaccgccagatcgccgatatggaactgaccaacgccacggtgaaatacgacgccctgcacaaactgctcgatggccaggaggtcaaggcgccgttctccggcatcgtggtgccgccaccgggcaacacctcatcccagggcggcggcaataacaatgccccggtgcaggccggcagcaaggtcagccagggccaggtgctgtttgggctggcgaatatcgaacgactgaaaatcaccgccaaggtctcggagctggacatcaaccaattgcaccagggccaggcggtggaagtgctgggcgacgggtttgatggcgagcgcctgaccggctcggtaagcgtggtcagcggcctggcgattgccaacgacagccagggcagcgcgcagtttccggtgaccctgtcgatccccaagctcacgccgcagcagttgcaacgggtgcgcctggggatgagtgcgcgattgaccatcgtgacctacaacaatgcccaggcgatggtgattccgagccaggcgatccaggcagatcacacggtggagtatcgggaggcgatggataaaccggtggagcgggtgaaagtgaccacggggcaagcaacggcgcagggcgtggaggtgttcggcctcaagccgggcttcgtgaagacctcaagataaatggagcccctgccacatttagatctctgtcagctttgaagccagtgccttggcttgcagcgccacatcagtcaccgccgtgctttcccaccacatcccacgcaacggcgggcccatggcgaacaatcgctggctgacctgcccctgggcgtccaccactgcccccgacgtatccgccgcaatccccaacgccagcggccctggctggatcagcccacgcttgagcaactgccggggcaatggccgggccacgcggcgccagtcgtattcgataccgctggagttgatcagcgctgcgcctgagaccagggtgatgccttgttcgccgcgataacgcaaacgaatcgtcaccccttcacccgaaggttccagccccttgaacgacgccgcaaggatccgcaaccgcccctcttcatgcagccgcgccaccaactgcgcgctcaatggcggcgaacggtggtgatggctctcccaccagggccgcacatgcctgacgaactggcgcttctcacgctcgctggcctggctccataaacgcgcgatatgcgcacgcacggtgtccagcggcgcttgccagtcgatgccctgggcctgcgcaagcgcgcattgccgccgcacctcgcgcagcaattgccgagggctgcgcaggccatggtcctccccaagaaaatccacccaggccggcggttgccgccgcacatggggcagcaggccgtgacgcgagaacacctcgatcggcccgcgatgcccggcctgttccagggagaccacggcgtcgaccatggtcagcccggaaccgatgatcagcaccggcgcctgcgggtcgatccggcgcatcgcgctcacgtcccacgggtccaccgccgccgcgttcaacccgctggagtcggtctgcggtgtacgcgccgccgggaacatgccggtagccagtaccgcaaacgcgccacgcaattgctggccgttatcgagggtcagcagggttgagcctgcatccacttgcaggtcgaccacttcgccacgcacatgctccacgctggacgcggactgcgccttcgcctcggccaaacgttgctgggcatacaagccgaatatcccgcgtggcgggaacagttcgctgatcggcacgtgctgctggtcggactcgggccagccgccagcgccgatgtagtcggtgagccattgggtcaggtcgtctgggttgtccgggtcgacactcatgcgcgccgcgttgccgttcagggtgtggcccagttcgacggcgctgtaggcctcgccccggcccagctcggcacgcggttcgaccaccagcacccggcgcgcgcccggcaggcgcagcagttgcacggccagcatcgtgccgctcaggccgccgccgatgatcaggacatcagcgttgcggatggattcagtcatgcggagtcgcccttactgtttgcccaggtaaatgtcatgcagatcaccccgcgccagcagttcagcggcgctgccactcaaggccacgtgcccagtatccaatacgtagccgtgggacgcatagttcagcgcgacgttgatgttctgctcggcgatcaggaagctcacctgctgctcgcggttgagctgagcgatgatcgcgaaaatctcctgcacgatcataggcgccaaacccatggacggctcgtcgagcagtaccaaagtaggacgggtcatcaatgcccggccgatggcgaccatctgctgctcaccgcccgaggtgagaccggcgcgggtatggcgcttggtcttgagccgtgggaaccaggcgtagacacgttccaggtcgtgctccatgtcgcggcgactcaggcgtcgcacaaagccgccgctgcgcaggttgtcttccacgctcagttggccgaacacatggcggccctccaacacatgcaccatgccctggcgcacgcgctggctggggtcgatgccggccaggtcgccaccggcgtattcgatcacaccgcgactgacctcggcccgttcggcacgcaccaagccggagatggccttgagcgtggtgctcttgccggcgccattggcaccgagcaaggcgacgatggcgcccttgggcacgctcaacgacaccccggccaccgcgaggatcgcgccgtcgtagatcacttcgatatcgttgaccgtcagcagcgatggctgcgcggcagcggtggcgggctggctcatggtttattcatccccggtgcaggtgcgtggcgtcaggcctttttccttggcgaaggcggcggacttttcatcgatcaacggacgcaacagcgcacggtcggcggcgatccagtcgctgatcagcgtccaattggcgccgtcccactgctgcacccgcgccgagccgccaccctcgtggtcgcggcacgacagcttgaggttctgcatcaggcccaggtaacccatgtccttcaagcgcgcatcgtcgatgttcaggtgttccaggccccagcggccttcttcgccgttgagcgggcgcttgccgaatttggcctggccggtgcggatcgcctccaccgccacggcggcgttcaccaggccggagttgtagtagacgctgccgaagttcttcaggtccttgaggtcactgtggcccttgtcgaggatgtattgcttgaggcgtttgtggatctcgaaatccgccccggccgggtatggcgtaagggccaggtagcctttggcggcggcaccggcgggcaatacgtcttcgctggaactggcccagatatcgccgatgatgtggtccaccgggaagccgaagcgcgccgccgtcttcaccgccaccggcgtggacacgccccaggtgcgcaggaacacccagtccgggttggcctggcgcacctggcgccattgcgcggactgttcgttgccggggtcggccaccggaatctggatgttttcgaagccgtatttttccgccagcaacttcagcgggccgagggtttcgcgcccgtaggccgagtcgtggtagaccgtggcgatcttcttgcccttgagcttgtcgaaaccgccttcacgctcggcgatgtagttcaccagcgtcgaggcctcactgtagaaagtcagcatcaccgggaagttatacgggaacaccgtgccgtcggtggcttcggtgcgaccgtagccgagggtgatcagcgggatcttgtccacctcggcccgctcgctcagcgcatacgccgccggcgcgccattgggctggtacaccgcgaccggcgcgccatccaggccattcttgaagcgctcgtagcactcgatgcccttctccgccgtccactcggtctcgcattcctgccacaccagcttgacgccgttgatgccaccttcgacctcgttgatgtaacgcaggtagtcgatcatcccggcccacacctgcacgccgctggacgcataggcgcccacacggtaggtcgccaggggaatgaattgctggtccggcgaggccatcgcctgggggactgcaccggccaaagttgccagcgcaaaggcagcgccgaccagggaacgtttcaaggatgcacgcatagggattctcttaagggaatgtcagaaacgcagcggccactgccgcacgcggtcacgcaggttgtgcaacaggcgaatcaagccctcgggctccttgatcaggaacacgatgatcaacacgccaaaaatgattttctgcaggttctgcaactgccccgcatccaccgagccgccgaacagtgcctgcccggcgtggctgaggaagatcggcagcaaactgataaaggccgcgccgacaaagttgccggcgatactgcccatgccgccgataatgatgatgaacaggatctggaaggagcggttgatatcgaagctgctggcgctggccgtgcccaggtaggcaaaggcccacagcgcaccggctatccccaggtagaacgagctgaccgcgaacgccaggcgcttgtagcgcaccaccgggatgccgaccacggcggcggcggtgtccatgtcgcggatcgccatccagttgcgcccgacctggctgcgcaccaggttgagggcggtccaggtcagcagcagcacggtgaccagggtcagcaggtagcggcccaatggtgtgttgaggtcatgaccgaacagcgccagcctgggcgcggaaatggtcccggacgaaccgtagttgtagaaccagggaaacttgacgaacagccattccaggaagaactgtgcggccagggtggtgaccatcaggtagaagcccttgatccgcgaactgggcaggccgaacagcaggccaaccaacgcactgatgatcccgccgccgagcagcgcaaccggcaaacccagatccggcaggcgcagcagaaaaccgtaggtggcaaacgcaccgacggccatgaagccggccgcgcccaccgaggtctgcccggtgtagccggtgagcaggttcagacccagccccgccagggacagcaccaggaacgggatcaggatcgcattcagccaatagtcattgccccacagcggcaccccgataaaagccagtgccaacaggccgatcaaggcccagggaatgcgccgctgaatcagcagcaacggcgcggtgtgttgtacaagagggatcgacatgctttcagactcgctcgatggcgcgctcgccgaacaggccggcggggcggatatacaggaaggccagggccagtacgtaggcgaaccacggcgtgataccgccgccgatcaacgggccgatgtacacctcggccaggttctccgccgcgccgacaatcagtccgccgacaatcgccccgccaatcgaggtaaagccgccgatgatcaacaccggcaaggccttgagcaccaccagcgacagcgagaactgcacgccctgacgcgcgccccacagcaacccggccaccagcccgacgatgccggccacggcccagacgatctgccagatgcggttgaggttgatgccgatggacagcgccgccgtggtgtcatccgccaccgcgcgcagcgacacaccgatgcgggtcttgttgaacagcagcgccagcaccgtcaccagcaccaccgccgcagcggcagcgatcaggtcgaactggctgagcatcagcgggccgacgaacagcggcacgtcgtcgatgcccaggtccagcgcccgcacctgggagcccatcaacccctgggccaggccttcgataatgaacgacaggcccagcgtggccatgaacaaggtgatctgcgaacggttcaccagtggcctgaggaccaggcgctcgatcagcagcgcgccgacgctcatcacgatcaccgtgagcagcaacgccagggcaaacggcacgccctggtcatgcaggctgacgaaggtcagtgcagcaaacagcagcatcgcgccctgggcaaaattgaatacgccactggccttgtagatcagcacgaagccgatggcgaccagcgaatacatggtgccggcgagcaggccgccgagcagggtttcaaagaaaaacgtcatccgtttaccactcccaggtaggccgcgatcacctcgggattggcttggacctgagccggcgtgccgtcaccgaccttgcgcccgtagtcgagcaccaccacatggtcggacaggcccatgaccacgcccatgtcgtgttcgatcaacaccacggtggtgccgaggtcgcggttgacgtcggcgacgaagcgcgccatttcctgtttttcttcggcgttcatgccggccatgggctcgtccagcagcaacaagctcggccctgcgatcaacgcccggcccagttccacgcgcttttgcaggccgtaggacaggttgcccaccagcacatcgcggtgggcttgcagctccaggaattcgagaatgccctgtgcgcgcaaccggaacgccttggcttcgcggcgtgcgcgaggcaagcccagggcttgttcgataaagctgctacgcatatgccgcgacaggccggtgaggatgttgtcgagcacactcatcttcttgaacagcgcgttgttctggaaggtgcggccaatgccgcggcgcgcggcgcccaacgggtcgatgcggtggaagtgctggtcctcgaacacgatctcaccggcatcaaagcggtacacgccgttgagcacgttgagcaacgagcttttaccggcaccattgggaccgatcagcgcgcagatctcgccgcgcagcacctcgaaggacagggcattgatcgccttgacccccttgaacgacagcgagatatcccgcacctgcaaaatggcctggctcatgcgatgtcccgtttgaattccgccacccacaccggtgaaggcgtggctttgacgggttgccagatgtacgccaggcgctggaaccccaggagccggcgcacgcggtttttcagcaggcgccgcaagccactttgcgggtgggcgatggcccagtcgcacaggcgtcggcgccaggtgccgtggggcgccaggcggctttcgatctcatcggccaggtgctgcaagcgggcgggcgacaacagcaggccggtgggcgcgacttcactgcggtcgcgacgcgccgaggccaggctctccgggaaggccaggccgtgaccactgttcagccattgctccagcaccacggccagaccgccctgccagtgggtaccctcttcgctccacaacagggtttcccccgtgggctgccaccagcgtgccaggtgttgcgtcggcgccaacgggccgagcaactgggcaaaatccaacaagttggccgactgccagtgccgcgcagtctggcggccctgcacataggaatgagtcgggcgaatgcgccacaggtgctgttgcagtgcctcgggctccaggtcatcggccagggtcagcacctgcccgccgatgacgtgcgccgccagggccagcagcaacaggttcggctcgaacgcaccgctgagggccagccgcgattgctcgctgaacccctgctggcgcaaaccatcggccaggcgttccacatcgcgcaaggcgtcgatccagcgccatgcgcaccactgcccccggcgcttgtggcgcagggcactatgcagcggcgtgatctgcgcccagtggtgcagttgttcgagggccttgggcaggtggccgagccactcggcgggccactccacggccagtgggcgtttgagttcgtgcacgctcataggggtagtgctcctattggtgtgtgtgcgtgcggtggtccgctggctggattatttggatcaacaccgatctactgtgggagggggcttgcccccgatggcggtgtgtcagtcacaagtgctttgactggactgccgctatcgggggcaagccccctcccacattggttatgtgcgcgtcagataaattgcggtagccggcaccagggtggttggaggccaaccttgcgccgtcgccaaacaacttctcgcgcaacgtgccctgggcatactcggtcttgtacaccccgcgcttctgcaactccggcaccagcaggtccacggcgtcgatgaaggtctcgtgggtcagcgcgtaggccaggttgaagccgtccacatcggtctcttcgacccattcctgcaacaggtccgcgacggtttccgggccgccgacgaacagcgggccaaagccgccgataccgacccagtcggccagttcattcggggtccagaccttgttcggatcggccgtcgagaacgcctctaccgccgattgaatggcgttggtgtgcacgtgcttgagcggtgcatcgggtttgaactggctgaagtcgatgccggtccagccggaaatcagcgccatcgctccctcgtagctgacgtaggatttgtattcctcgaacttggctttggccttggcatcggtctcaccgacaatcacggtctgcaagttgaagatcaggattttctgcggatcgcgcccggcttcggcggcacggcggcggatgtcggcgacggtctttttcagcagcaccttggacggcgcggcgacgaatacgcactcggcctgttcggcggcgaactgcttgccacggctggacgcgcccgcctggtagagcactggcgtgcgctgcggcgacggttcacagaggtgaatgccgggcacctggaagtgtttgccgacatggcggatctcgtggattttgctcgggtcgctgaagatccggcgttcgcgatcacgcaacacggcgccctcctcccaactgccctcccagagcttgtagcagacctccaggtattcctcggcgtagtcgtagcgcgcatcgtgttcggtctgggctttctggccgaggttcttggcgccgctttccaggtaggaggtgacgatgttccagccgatacggcccttggtcaggtgatccagggtggagagacggcgggcgaacgggtacgggtgttcgaacgacaacgacgccgtcaggccgaagcccaagtgttcggtaaccagggccatcggcgcgatcaacgacagcgggtcattgaccggcacctgcgtcgcctggcgaatggccgcgtcgccgttgccgttgtacacatcatagatgcccagcacgtcggcgataaacaggccgtcgaactttccgcgttcaaggattttggcgaggtcggtccagtattccaggtccttgtactgccacgaacggtcacgtggatgcgcccacaggcccggggattggtggccgacacagttcatgtcgaaggcattcaagcggatttcacgggacatcaaagcactccgttgaggtggtagttgccgacgatctggtacttcgtacgcagcgggtcatccaggctcgacggcagtgcggtgcgttggccggtgagttcgaactcggcgttgctcgcggcgatcagggcttcggcggcggcgatttgcgcttcggtagccgcgacggggctggggtgggtttcggcgcgttcaaacaaagccgcagccacatcgacgcgaatctgcaagtcgccgaaacggctgatcacgtaggggtcggtgctgttttcaacgtggcggcgggtgctgtccagcagttggcgcgcaaggttcagtgcagtcatgggtgaggctcctcagttccaggcgtggcgcgcaggcttcacgccgttgagcacgtagttgccgatcaggtggtatttccagcgggccgggtcgtgcagggtgtgggtgcgcgcgttgcgccagaagcggtcgaggttgtgcttgccggtgaccgagcgggtgccggccagttcgaacagtttgctgctggcgagcaaggcggtttcggcagaaaggactttggcttgggcaaccaccagtgaggcgtgggcgacgctgtcttcgccgggctcggcgagggcgcggtccacggcttcccccgctttggcgaggatggcttcggtgccgtgcacgcgccattccaggtcgccgatggcggcgatggtgaacgggtcctgccagccgtgatcctgttggctgtcgatccagggccgcgcctggcgtgcgtagattttcgcctgctccaaagcgccaacggcaataccggtatcgaccgccgcctgaatgatctgcgaaatcggaccattggcggtgggctggtcaaaagcctgatgcgcagggatcaccgcgctcaagggcacagtcacaccatcgagggtcacgccaccactggcggtggtgcgctggccgaaaccgtcccagctgtcgatcacgttcaggccgggcgcgtcacgttcgacaaacgcgataaaggcctggccgtcttcattgttgccgacggtgggcaccaggtgagcgaacagcgcgccggtgcagtagaacttctcgccgttgatttgcgcggtatcgccgtgaaagcgaatctgggtatcgaaggtgccggcgttcttgctcttggcttcggaaaaggcgttgccgaaacggtagccctggaggactttgccgaagtagtactgtttttgtgcctcggtcgcggtttgcagcaggatgtccaccacgcccaggtggttctgcgggatctgccccagggacggatcggcggcagagatcaatttgatcacctcggccacggtcacataggacacgccagcgccgccgtacgctttgggaatggtgatgccccacaggccgctggcggagaactcgtcaagctcggccactggcaggcgccgctcacggtcgcgggcgctggcctcgatggcaaagcgtgcggccaggcgcgtggcgacctcgatcgcttccgcgtccgagcggatgatatgggcagggtgttgagggtgggctgacatgggccgactccaggctccgaggggattacctgggtgattgcaggagtcgtgcctgaatgtgacagtccatgaaaccggctgattgccttgtagaaaacggagcaacacatcactgaaatcagcaaactgcctgacaagtgttgctccagcaacagtctcctgttgattaaaatgtgggactgacgcttattaaaattttaatcctcgatcgtatacacagcttctgccgagtggttaacattgttgacgatatagctggcggtagcagtcgttgcgggagaagcaaagagcgcatcaaaaagtttaaattcaagcatctggtcgatatcagtgaccgtcgcttgcgagaagaaaatccattgaccatcggtagaaacctgaacataaaccacgtccccaactgcaatccctggatacagcggtatgcagagccgtgctctgttacctgcaattgctgcacgagaaataacattgttacttgagggcacaatagagggggcagaaagcaggtcagagcgagatactagaattccgttcattaataaatcctcactaattaaagtcaaaggtgcgccctgccgtatttggtacgaatatcgattttaaaatcactgtacaaaaacaaggcaagtgaaactaaagcgcccttcaaatataaacagggaactcaaaaaagtaagctgtgaactttgacagttgacaaactaaataacgacattccgtacaaactttactgcgacgcccccatcattgcgataggcatgaggctgatggctggcaaacatgaaaaactcgcccgtaccaattgtcttgtcttcacctgccaacaccagagtcaagcaaccctcaaagacaaacagctgctcgctccagccttcaaggtctgggtccgggcagtagcgatcgccaggttcaaggcgccactcccagagttcgacttcacgccgcgccgtggccttggccagcaacaccgccttgctgccgggaatttcaccggcccaggccagctcattgatacggctatggtcacgcacatccggcgcctggatcaggtcgctgaacgccacgtccaacgcttcggccacgcggtcgagggtggacaagctgacgttcttttcgcccgcctcgatggccactagcatgcgccggctgaccccggatttttccgagagcaaggtctggctgaggtcggcggcatggcgcaggcgacggacgttctggctgacgtgctgcaggaccgaagcccggtggggattttctttgtgcactatattgctcaatgggtgggtgtgcgcagtatactgcccagcgtgcggcgcattgtgcggtccgtgcctttcccttgcaagaccgagccgccatgaccaccccgaacgcctcccctcgtttcaaccgtttcagcaaagccgagtgcatcctggtggtgatcaccatgatctggggcggcacatttttgctggtgcagcacgcaatgacggtcagcgggccgatgttttttgtcgggttgcggtttgccgccgcggcgattgtggtggggttcttttccttgcgcacgttgcgcgacctgacgctgttcgaattgaaggccggagtgtttatcggtgtggcgatcatgtttggctacgggctgcaaacgattggcttgcagaccatcttgagcagtcaatcggcgtttatcacggcgttatatgtgccgttcgtaccgctgttgcaatggctggtgcttggccgtcgcccggggttgatgccgagcatcggtattatgctggcgtttaccggcttgatgctgctgaccgggccggcgggggcttcgctgaatttcagtcccggtgaaatcgccacgttgatcggtgcggtggcaatcgcggcggagatcatcctgatcagcgcctttgccgggcaggtggacgtgcgtcgggtgaccgtggtgcaactggccacggcgtcgttgctgtcgttcctgatggtggtgccaatgggcgaggcgttgccggggttttcgtggttgctgctgttcagcgcggtgggcctgggcttgaccagtgcggtgatccaggtggcgatgaattgggcgcagcaaagtgtttcgccgacccgcgccacgttgatttatgccggtgagccggtgtgggccggcgtggtcgggcggattgccggggaacgcttcccgccgatcgcgatggtgggggcggcgttgattgtgttggcggtgattgtcagcgagatgaagaccaaggggcagaaggccctggaattgcgcgatgagagggaacaggaacagcagggataaggtccgagtacttgcagtggctgtcagatcgccatcgcgggcaagcccggctcccacaggggggggcggtgtcgcttgcccgaatcgggttacctgaaacaatgccaaatgggcgatttcggcttagcttgtaggatcctgccacatcttgccgtttggtgatcgtgaaagcggcacgtatgatgcatcccaaactcccgcagattagaagcctatgtccctgatagttctactgcttctgccgttcattggcagctgtctggcggccttgctgccgcacaatgcacgtaacaccgaatccctgctggccggccttgtggccctggtcggcaccattcaagtcgccctgctctacccccagatcgcccacggtggcgtgatccgcgaagaattcatgtggttgcccagcctcgggctgaacttcgtgctacgcatggatgggtttgcctggctgttctcgatgctggtgctgggcatcggcacgctggtgtcgctgtatgcgcgctattacatgtcgccagacgacccggtgccacgcttcttcgcgtttttcctggcgttcatgggcgccatgctcgggctggtgatctccggcaacctgatccagatcgtgttcttctgggaactgaccagcctgttctcgttcctgttgatcggctattggcaccaccgcgccgatgcacgccgtggggcgtacatggcactgatggtcaccggcgccggcggtctgtgcctgttggcgggggtgatgctgctggggcatatcgtcggcagctatgacctggaccaggtgctggcggcaggcgagcagatccgcgcgcattcgctgtacccggccatgctggccctggtgctgatcggcgccttgagcaaaagcgcgcagttccccttccacttctggctgccccacgcgatggcggcccctacgccggtgtcggcgtacctgcattcggcaacgatggtgaaggccggcgtgttcctgctggcccgcctgtggccgtcgctgtccggcagcgaagaatggttctggatcgtcggcggtgccggcgccctcaccctcctcctcggcgcttactgcgccatgttccagaatgatctcaagggcctgctggcctactccaccatcagccacctcgggctgatcaccttattgcttggcctgaacagcccgctggccgccgtcgcggcagtgttccatatcctcaaccacgccacgttcaaggcctcgctgttcatggctgcaggcatcatcgaccacgaaagcggcacgcgggacatccgcaagctcagcgggctggtgcgtttgatcccgtttaccgcgaccctggcgatggtggccagtgcgtccatggccggcgtgccgttgctcaatggcttcctgtccaaagagatgttcttcgccgaaaccgtgttcatcacctcgaccgcttgggtggagttcgccctgccgctgatcgcgaccatcgccggtacgttcagcgtggcctacgccctgcgcttcaccgtcgacgtgttcttcggcccgcccgcgaccgatctgccgcacacaccccacgaaccaccgcgctggatgcgcgcaccagtcgagttgctggtgttcacctgcctgctggtgggcatcttcccggcccaggtggtcggctcgatcctcgccgccgccgcgttgccggtggtgggtggtgtactgcccgagtacagcctggcgatctggcacggctggaacgcaccgatgatcatgagcctggtggccatgtccggcggcgtggtgctgtacctgctgctgcgcaagcaactcaagcgtggtcgcttcaaatacccgccggtgatcagctacttcaacggcaagcgcggcttcgagcgcagcctggtggtgatgatgcgcggcgtgcgcaggatcgaaaaacgcatcagcaccaagcgcctgcagacccagttgttcctgctggtgctggtggcggtggtcggcggcatgatcccgatgctcaacagtggcctcagttggggcgaccgaccgaagatcccgggttccatcgtattcgtgaccctgtggctgctggcgattgcctgtgccctcggcgccgcctggcaagccaagtaccaccggctggcggccctgaccatggtcagcgtgtgcggcctgatgacctgcgtgaccttcgtgtggttctcggcaccggacctggcgctgacccagttggtggtcgaagtggtgaccaccgtgctgatcctgctcggcctgcgctggctgccacggcggatcgaagaggtgtcgccgctgcccagctcgctgcgcaaggcgcgcatccgtcgcctgcgtgacttcctgttgtccaccgtggtgggcggcggtatggcgttgctgtcctacgcgatgctgacccgccagacgcccaacgatatctcctcgttctacttgagccgcgccctgcccgagggcggcggcagcaatgtggtgaacgtgatgctggtggacttccggggcttcgacaccctcggtgaaatcaccgtgctcggcgccgtggcgctgacagtgtacgccctgctgcggcgcttccgcccttcaaaagagagcatggagttgccgccgcaacagcgccagctggcgccggacgtggccaccgacctggtcaacccgcgccaggccagcgacaccgcgctgggcttcatgatggtgccggcggtgctggtgcgcctgctgctgccgattgcgctggtggtgtcgttctacctgttcatgcgcggccacaaccaaccgggtggcgggtttgttgccggcctggtgatgtcggtggcgtttatcctgcaatacatggtcgctggcacgcagtgggtcgaggcgcaaatgagcctgcggccgatgcgctggatgggcttcgggctgctgtcggcaaccctgaccgggctcggcgcgttgttcgccggctacccgttcctcaccactcacacctggcatttcagcctgccgctgctcggcgacatccatatcgccagcgcgctgttcttcgacgtcggcgtgtacgccatggtcgttggctcgacgctgctgatgctcactgccctcggccaccagtccgtgcgggcccataaaccgagcaaccaggccaaagtggttgccgcaacggaaggagccgcctgatggaagaagtcatcgcaattgccattggagtcctggcggcttccggcgtctggttgatcctgcgaccacggaccttccaggtggtgatgggtctgtgcctgctgtcatacggggtcaacctgttcattttcagcatgggcagcctgtttatcggcaaggagccgatcatcaaggacggcgtgccgcaagacctgctcaactacaccgatcccctgccccaggccctggtgctcacggccatcgtgatcagctttgccatgaccgcgctgttccttgtggtgctgctggcgtcacggggcctgaccggcaccgaccatgtggacggccgggagcccaaggaatgaattgggtgaatcaactgatcgtcgcaccgatcctgctgccgttgctgaccgccgcgctgatgctgatgcttggcgaaaagcgccgcccgctcaaggcgaaaatcaatctgttctccagcgtcatcggcctgggcatcgccatcctgctgctgtactggacgcaaaaaggcggcccaggctcgattggggtttacctgccgggcaactggcaagtgccgttcggcattgtgctggtggtggaccaactgtcggcgctgatgctggtgctcaccgggatcatcggcgtaagtgcgctgctgttcgccatggcccgctgggatcgcgcgggcaccagcttccacgcgctgttccagatccagatgatgggcctgtacggcgcgttcctgaccgccgacctgttcaacctgttcgtgttcttcgaagtgctgctggcggcctcctatggcctgatgctgcacggctccgggcgtgcgcgagtgtcgtcggggctgcattacatcgcgatcaacttgctggcatcgtcgctgttcctgattggcgcggcgatgatctacggcgtcaccggcacgctgaacttcgctgacctggcgctgaaaatcccactggtgccggaggctgatcgtggcctgttgcacgctggggcggcgatcctggcgacggcgttcctggccaaggccggcatgtggccgctgaacttctggctggagcccgcctactcgtcggcgagtgcgccggtggcggcgatgtttgcgatcatgaccaaggttggcgtgtacaccgtgctgcgcctgtggaccctgctgttctccagccaggccggggcgtcggcgctgtttggtggggattggctggtgtatggcggcatggcgaccatcatctgcgcggcactggcgatggtcgcggcgcagcgcctggagcgcatggccagcttgagcatcctggtgtcggcgggaattctgttgtccgcagtggggtttgcccagccaagcctgacggcgggcgcgctgttctatctggtcagttctaccttggccttgagcgcgctgttcctgctggctgaattgatcgaacggtcacgctcggccaatgacctgccgctggatgaagagatcgatgcgctgcccaaggccatggaatccctgcatccgcgccctggcgtcaacctcgatgacgagcagcaagccgtggtcggccaggtgatcccctggaccatggcgttcctcggcttgagctttattgcctgtgccctgctgattatcggcatgccgccgctctccgggtttatcggcaagctcagtctgttgagtgcgctggtcaatccgctgggcctgggcgtcagtgttgacgaaccgatccgaccggccgcctggggcttggtggcgctgctgattctctccggcctggcctcgctgattgccttcgcacgcctgggcatccagcgtttctggacccctgaggaacgcccttcgccgctgctgcgtcgctacgagtgcttgccgatcttcttcctgctgggcttgagcatcctgctgaccttcaaggccgagccgctgatgcgctacacccaggccaccgccgtcagcctgaacaacccggaacactacgtgatggcggtgatggcgacgcggccggtggcgagtcctgaagccaaggctgccgcactggaggtacagccatgaaacgactgttccctgccccgtggttgtccctggcgttgtgggtgttgtggctggtgctgaacctgtccgtcagccccggcaacctgctgctgggcgcgctgttgggctttctcgcgccgctgctgatggcgccgttgcggccgttgcccatccgtatccgccgccctggcgtgatcatccgcctgtttttcctggtgggccgcgacgtgatcgcctccaacctgcaagtggcctggggcgtgctgatgtgtagctcccgcccgccgcgttcgcgcttcatcaagatccccctggacttgcgtgatgccaacggcctggccgcgctgtcgatgatcaccacagtggtgcctggcaccatctggtcggaactggcgctggaccgcagcatcctgctcctgcatgtgtttgacctggaggatgaagcgtctttcatcgagcacttcaagtccgcctacgagcggcccctgatggagatcttcgaatgagcgccctgctcgccaatgcgatcctgttcagcctgttcctgttctccctggccatggtgctgaccctggtgcgcctgttcaaaggcccatcagcccaggaccgggtactggcgctggactacctgtacatcctggcgatgttgatgatgctgacgctgggcattcgttatgccagtgacacctactttgaagcggcgctgctgatcgcgctgttcggcttcgtgggctcgtttgccctggcgaaattcctgctgcgtggggaggtgattgaatgatgccgttatggatggaaatcgtcgtggccgtgctgctggtgctcagcagtgtatttgcattgattggcgcgatcgggttgctgcgcatgaaggacttcttccagcgcatgcacccgccggcactcgcatcgacgctgggagcgtggtgtgtggcgttggcgtcgatcatttatttttcggtgctcaagtccgggccggtgttgcacgggtggctgattccgattctgctgtcgatcaccgtgccggtgaccacgttgctgttggcgcgcacggcgttgttccgcaagcgcatggctggcgatgatgtacccgccgaagtcagcagccgccgttgatccctatagaaaacacggtcaaaactgtgggagggggcttgcccccgatggcggtggatcagtcagcttacctgtagctgacccactgctatcgggggcaagccccctcccacatttggattggcgctaggcaaaagacctgatgtgcgccgccaattccgccaacccctcatcatcggcccgcacatgatcgtgggaggagatgtacccttcatatgcctcgaagaacttgtccaccttcgaactcagcggcttgaaggtactgtcgccgccggtcccatgcatgggaaacagcttcgcatgcaggtgatccaccccatacccttccaggatcatcccggtgcgcgccacatcggaaaacgcacggtcgatctgctgtgcggttttctttgcggcgacggcgagcccggccaacacttcatccgactgtgcaaacgcatagctgccgtaatgctgcttggggatcaccacgctgaaacccggggtgttggggaagatcgataagaaggccatgtgctggtcgtcttcccacaggatgtgcgccggggaagtcttttggacgatgctgcagaaaatacacgtcattcgagtctccatcagtggttcttggtggccttcaaatagcacaacttccattacaagataggcgagccaaacctgcgaaaccgcggcatccaatcacccagaatctgcgccgacgccagcacatgatgcgcccgcccgatcaacagccggcgtggcacaacgccgatgtaccgggaatcatcgctgttgtcgcggttgtccccgagcatgaaatagctgtcggccggcaccaccagcggcccgaaactgcgcatcgctcgcaccgtcggcatgaactgcaccgtgcgctgccggttggccgccaactcgttcagcttgattcccggcaccgcatggccgggaacgatgggctcgctgatgtcctgcgcatcactgtaggtggcaggcacgccgttgacccacaacacctcatctttcatttccagggtgtcaccgggtatgccgacgatgcgcttgatcaggcgcatgccgtccttgggcgacgagaacgttaccacatcgccacgttgggggttatcgagctgggccagggaaatgtccgtgagcggcagcttgaggtcgtaggccacacgattgaccaacaccacatcgccctccagcaaggtcgggcgcatggagccggagggaatgggattccagtccgccagggaggtgcggaaaacgccgaagcacaaccagaaaatgattgcgtaacggtaacggatcaaccaacttcgcatacatcctcgcacggcagacaggggcatcagggctgtttcccagacgcccggttgtttcacgcgaggattaaatcaacattagcgtccaagcgcacaaaaaggagttttcgccatggatatcaaatgttcggtgtttatcgccgccagcgtcgatggcttcatcgcccgcccggacggtgatatcgactggttgcaccggccggagtatgaaaccgccaagttgaacggtgtgacttacgaaagtttcatcgccacggtggatgcactggtgatgggacgcaagaccctggagaaggtactgtcctttgcggagtggccctatgagggtacgccggtcattgcgctcttccatcagcctctgcaaatccctgcgcatctggagggcaaggtcgaggtcatggcaggagacgtcacctcactcgtggcaacgttagccgagcgcggcatgaagcacctctatatcgacggaggccagacgatccaggcgtttcttgaagcgggcctgatgaatgagctgatcattacgcgtatcccggttttactcgggcaagggatcccactcttcagccagatcggtcgagaacttgagcttcgccatatcggcacgcatgagtcggacaatggttttgttcaaagtcggtatcaagtgatgcaatcttcatagcggcggcagacactcacatcgcgcaagacggacagggggtcaggatgactaagcacattattgttatcggcggcgagtccaccgaagacatgcagcgtatgacgcgtatcgataaacatatcgtcgcgtcatcaggcaaaacgcaccctactgtgctctacatctctaccgccaatggcgatgaccgaatcaagatttccgatttcaccaccaaatatgaaagcgctggctgccgtgtaaccgcgctggcatttttcatttcacccttccccaacgccaatcatgtttcatcactctttgagcaagccgacattatttacgtaccaggcggaaatacccgcgcgatgttggcgatctggcgcgaatttgctgtagtggaccatctgaagaggtcctgggaaaacggcaaagtcctgtgtggtgtcagtgcaggcgccatttgctggttcgagcatgggcattccgattcagggggagtgtttgcgctggttcacggcctgggcttgctgccaggagcactgtgtccgcatttcagctcagaagcaggaagggaaacctcgtttgtcgagcttgttcagcgtgagggtatacaacctgcctacgcggtcgatgatggcgtcgctttgcatttcaaggacggcgagtatcacgagaccatctataacgacacagccaatagcgcctataaagtcagtacaaggccaccctacctagtacagatattgcgaacttcaggcgggtaagcgccgctaggaaatttccgacagcgttttaaggttttcgctcggaagatggctgcctaatcttcggtggtcgctgcaaattcagcgaccgggtttcgcagcccggttaaactctagacgcacagcgtccacctcagatagcgggcgcttttttatgcctgatgttatggcggctgtgcgcgggataccttcgggtatgccgggtgcctagagtcccggtctgcgaacctgcgtacagctgccacccgaatgtcgtttcgcagcgatgggtggtggctccaatactctaggagctttgccatgattaaagacagtccgaatccgccattagactcagccgcgtttcatactgcggctcatcgagcaattaaccactatctgaatccacctgagaaaccagagccttctactgaggaccatagtttatttactgtacgcgaaggattagacatcgagacgctgctggtcaacgcgtcggaggatcttgcctcggttcaagcgctggcaagccatttggcttttgagatcgacggcaatcctcgcagcgtggccttgggaatgtgtcggatgctggaggggatacagctaatggtggataaaacactaagcctcaaagaccatccaactcacacataaatctgaaaccgaagagttcgcaaagtgggcacggtaaaaaatgtgggagctggcttgcctgcgattgcggtgggtcagtcaacatttccggtgactgacacgccgtcatcgcaggcaagccagctcccacagtggatcgagtgaaacgttaaaccgatgtgcaaaaaaaacgccccgaaccagtcggggcgttttcattcagcgtttaccgatcaagcctgatccgccaaccgccacgtcgtcccacccttcccgtcttccaacaccacacccatcgcggtgagttggtcgcggatacggtcggattccgcccagtccttaccggcacgcgccgccaggcgcgcctggatcagcgcatccacctcagccgcatctacacgcccttcggcgccggcttgcaggaagtcctcaggcttcatttgcagaaccccaagcacactggccagctctttcaggcgcgccgccaggccggccgctgcgtcgaggtcgctctcgcgcaggcggttgatctcgcgcaccatctcgaacagcacggcgcaagcttctggggtgccgaagtcgtcgttcatcacttcggtgaagcgggccacgaaggcttcgccgccggccggcgctacggtcggcaggcctttcaacgcatggtagaaccgctccagggcgcccttggcgtccttgaggttgtcttccgagtagttgatggcgctgcggtagtggctcgataccagcaggtaacgcaccacttccgggtggtacttttccagcacgtcgcggatggtgaagaagttgttcaaggacttggacatcttctcgccattgatgcggatcatgccgcagtgcatccaggcgttggcgtaggtcttgccggtcgcggcttcgctctgggcgatttcgttttcatggtgcgggaactcgaggtcgctgccgccgccatgaatgtcgaaagtctcacccaggcagcaggtggacatcaccgagcattcgatgtgccagcccggacgcccggcgccccatggcgactcccagctcggctcgccgggcttggtggctttccacagtacgaaatcgagcgggtcctgcttggcttcgtcgacttcgatacgcgcgccgatgcgcaggtcttcgattttcttgcgcgacagcttgccgtagcccatgaacttggcgacgcggtagtacacgtcgccattgcccggcgcataggcgtaacccttgtcgatcagggtctggatcatcgcgtgcatgcccgggatatggtccgtggcacgcggttccatgtcaggcttgaggatattgaggcgggcctcgtcctcgtgcatcgcggcgatcatgcgctcggtcagcgcgtcgaacgactcgccgttttcgttggcgcggttgatgatcttgtcgtcgatgtcggtgatgttgcgcacataggtcaggtcatacccactgaaacgcaaccagcgggtcaccaggtcgaaggcaaccatgctgcggccgtggccgatgtggcagtagtcgtacacggtcatgccgcacacgtacatgcgcaccttgttgccgtccagcggcttgaagacttctttggtcttgctgagtgtgttgtagatcgttaacacgacaattcccttaagacagaatcactgaccccacgaatcacgcaaggtcacggtacggttgaataccgggcgacctggtttcgagtccttgatatccgcgcagaagtaaccttcgcgctcgaactggaaacggtcttccggctgtgcgtcgccaagcgatggctcggcacgacaacccgtaagtacttgcagggagtcagggttgatgttgtcgaggaaactcgcgctgtcttcggccttttcagggttcggcgagcggaacaggcgatcgtacagacgcacttcgcactcgatgctggcggccgccggcacccagtggatcacgcccttgaccttgcggccttcggggttcttgcccagggtgtccgggtcgtacgagcaacgcagttcgacgatgttgccatcggcgtccttgatcgcttcgtcggcacggatcacgtagctgccacgcaggcgcacttcgccgttcggctccaggcgtttgtagccttttggcggctcttccatgaagtcatcgcggtcgatgtagatttcacgggcgaacggcagcttgcgcacgccgagttcttctttctgcggatgacgcggcagctcgaggttatcgactttgtcttccgggtagttggtgatcacgactttcaacggacgcagcacgcacatggcgcgtggggcgttggcgtcgaggtcctggcggatgctgaactcaagcatgccgtagtcgaccacgccgtcggaacggttggtgccgaccatctcgcagaagttgcggatcgacgcaggcgtgtagccacggcgacggaagcccgacagcgtcgacatgcgtgggtcatcccagccatgcacatgcttttcatcaaccagttgcttgagcttgcgcttgctggtgatggtgtagttcaggttcaggcggctgaactcgtactgacgagggtgcgccggcaccggcaggctgtcgaggaaccattcgtacagcgggcgatggctttcgaactccagggtgcagatcgagtgggtgatgccttcgatggcgtccgactgaccgtgggtaaagtcgtagttcgggtagatgcaccacttgtcgcccgtctggtggtgatgggcgtggcggatgcggtacatgatcgggtcgcgcaggttcatgttcggcgaggccatgtcgatcttggcgcgcagtacgcgggcgccgtccgggaactcaccggcgcgcatgcgggcgaaccagtcgaggttctcttcgaccgaacggtcacggaacgggctgttcttgcccggctcggtcaggctgccacggtattccttggcctgctccggggtcaggtcgtcgacgtaggccttgccggccttgatcagctcgacggcccagtcgtgcagttggtcgaagtactgcgaggcatagcgcacttcaccggaccattcaaagcccagccatttcacgtcgctttcgatggcgtcgatgtattcctggtcttccttggccgggttggtgtcgtcgaaacgcaggtgcgtgacgccgccgaattcctgggccaggccgaagttcacacagatcgacttggcgtgaccgatgtgcaggtagccgttgggctctggcgggaagcgggtgacgatctgcgtgtgcttgcccgaatccaggtccgcctggatgatcgggcgcaggaaattgaccgggacggcaggtccggccttggaattcgaggtagggtcgacagtgggcttgctcataggatccttgaacagacaagtacgtggccgggctaggccgacaaaacaaagggcttatcatagctgatgctgtcaagccgctgacagggttgcggtgcatttaacgcaccagtggtaaaaaaccacctcgaaattcctgcaggtcacgctaaactgcgcgccttggccgcagtttcgccataccggtcgtggtgcccaggcacccaaatccacgaattccctgaaaagagtagtgaacatgactcaagtcaaactgaccaccaaccacggtgacatcgtcatcgagctgaacgccgagaaagcgccgatcaccgtcgccaacttcatcgagtacgtgaacgccggccactacgaaaacaccgttttccaccgtgtcatcggcaacttcatgatccagggcggcggtttcgagcctggcatgaaagaaaagaaagacaagcgcccaagcatccagaacgaagcggacaacggcctttccaacgacaagtacaccgtcgccatggcccgtaccatggagccgcattcagcctccgcgcagttcttcatcaacgtggccgacaacgccttcctgaaccacagcggcaagaacgtgcagggctggggctacgcggtattcggtaaagtcaccgaaggccaggacgtcgtcgacaagatcaaaggcgtgcagaccaccggtaaagccggtcaccaggatgttccggtagaagacgtgatcgtcgaaaaagccgagatcgttgggtgatattgctgatttcagatttgcatctggaagaggagcgcccggacattacccgggcgtttctggatctgctccacggccgcgcccgtggcgcccaggcgttgtacattctgggggacttcttcgaagcctggattggcgacgatgggatgacacccttccaacgctccatttgcgcagccctgcgcgaactgagcgacagcggcaccccgatttttatcatgcacggcaaccgcgatttcctgatcggcaaggcgttctgcaaagccgccggcgccagcttgctcaaggacccgagtgtcgtgcagctgcatggcgagcccgtgctgttgatgcacggcgacagcctctgtacccgcgacgtcggctatatgaagctgcggcgcatcctgcgtaacccgatcgtgctgtttatcctgcgccacctgcccttgggcacacgccacaagctggcgcgcaagctgcgcagtgaaagccgtgcgcagacacgcatgaaggctaacgacatcgtcgatgtaacgcccgaggaagtgccacgggtgatgcagctgttcggcgtgcgcaccctggtccacggccacacccaccgccccgccattcacaagttgcagattggcgaccaggcggccaagcggattgtgctgggggattgggacaagcagggctgggcgttgcaggtggatgagcaagggtttcagttggcggcgtttgattttgtgaacccgcaactggcactgcccggcgcataaaaaatgtgggaggggcggtgcgacgattcgacttgcccccgatggcggcggaagactcaacatatttgttggctgaaccactgctatcgggggcaagtcgaatcgtcgcaccgcccctcccacattgaattgtatttcgatctttactgatcagtgcccggaagctgccggccccgctttggcggtaaacggcggcttcgccagccataccagcagcatcaaccccatgaacatccaccccagcaacgtgaagtaatccacggtggacatcatgtacgcctggctggtgaggatctggtccagctgcgtgtaggccttctgccctgccccaccgagcgcctgcaaggcatcgcgggtcgccgagtcgtaggtggtcatgttctcgctcatgtacgcatggtgctggtccgcccggcgaatccagatccaggtggtcagcgacgccgcgaagctgccgcccagggtacgcaggaacgtggccaggcccgcgccgtcggcaatctggtgcggcggcaggtcggacatcaagatgctcaaggtcggcatgaagaacagcgccacgccaatccccatgaacagctgcaccagggcgatgtgctggaagtccacctcattggtgaagcctgcgcgcatgaagcagctcaagccaatcgccaggaaggccaggcccgccagcaggcgcaggtcgaacttgtgcgcgtacttgcccacgaacggcgacatcagcaccggcaaaataccaatcggcgccaccgccaggcccgcccaggtcgcggtgtagcccatctgggtctgcaaccactgcggcaggatcaggttgatgccgaagaagcctgcgtaccccaggatcaacacgatggtgccgatgcggaagttgcggtaggcaaacagcttcaggttgaccaccgggtgtttgtcggtgagttcccagatgatgaacaccgccagggcaatcaccgaaatcgccgcgcccacgataatgaagttggattcgaaccagtccaggtcattgcccttgtcgagaatgatctgcaaggcgcccacgccgacgatcaagctcagcaacccgacgtaatccatcggctgataactggtctgcaccggacgtttcttcaactgcgaacgcaccaccatcaccgcaaagataccgatgggcacgttgatgaagaaaatccacggccagctataactgtcggtaatccagccgccgaggatcggcccggcaatcggcgccaccaccgtgaccatcgccagcaacgccagggccatgccgcgcctcgccggcgggtacacggcgatcagcagtgtctgagtcatcgggtacaacggcccggccaccaggccttgtatgacgcgaaaagcgatcagctcgggcatcgacgtggaaataccacacaggaacgaggccagtacaaacagcatcgtcgcccacaagaacagcttcacctcgccaaaccgccggctcagccaaccggtgagcggcaaggcaattgcgttgctcaccgcaaacgaggtgatgacccaggtgccctgctccgaactcacgcccaggttgccggaaatggtcggcaacgccacgttggcgatggtggtgtcgagcacctgcataaaggttgccagcgacaggccaatggtggccatcaacaggctgggtggcgtgaaggaggcgttattgctcatcagcgttgcacagccttgggcgcggcgaggctgttgtcatggatcaactgggtgatcatggcgtcggcctcggcgagttggcggtcatacacgttggtgctgaacgaggctttctgcggcgcctgttgcgccagtaccgggccgctctggtcatgcaggtcgaccttgaccagggtgctcaagcccacgcgcagcgggtgcttggccagttcttcggcattgatgtggatacgcaccggcacccgttgcacgatcttgatccagttacccgtggcgttctgcgccggcagcagcgcaaacgcgctgccggtaccggcgccgaggctgtcgatggtgccgctgaatttcacgtcgctgccgtagatgtccgactcgatgtccaccggctggccaatgcgcatgtcacgcagttgggtttccttgaagttggcgtcgatccacagctggttcagcgggatcaccgccatcaaggcggtgcccggttgtacgcgctggcccaattgcacggtgcgcttggccacatagccggtgaccggtgcgatcaaggtgctgcgcgcattggccaggtaggcctggcgcagttgcgcggcggcagcctgcacgtccgggtgggagctgatcacggtgtcatccaccagcgcgttggtggttttcagttgctgctcaaggttggtcagggcgtttttcgcggcagtcaggctgtcacgggcgtgggacagttcttcctgggaaatcgccccgccctgggccagggttttacgtcggttgaagttgtcctgggcagtctgcacgtcggctttctgcgcattgacctgggccttcatgccgtcgacgttgctgtacaaaccacgcacttggcgcacggtgcgcgccaggttggcctgggcactttgcaggcccactgcggcatcgttagggtcaaagttgatcagcacctggccttcgtggaccaggtcgccatcgtcggcgccgatgctgaccacggtgccggtgaccagcggggtgatttccaccacgttgccgttcacgtaggcgtcgtcggtgctttcgctgaagcggccgtagagctcgtaccagccccacacgccgaccacgacgaggatgacgatcagcgccaggccgatcagcatcactttgcgtttgcgtgggttgttgtctttgggttgttcggttgcgttggtgttttcggcagtggccatgacaaatacctcaaattattccgtgcgtgtagctggggtggccgctgccacgttgtcggcgctgtagccgccgcccagggcctgcatcagttgaatcgacagatcgatctgcgcggcattcagggtcgccagctgacgctgggcctgcagcaattgctgctcgatgctgagcacatccaggtagttaccgatcccggagctgtagcgctgcacgccggtgtcgtaggactgctgggcaatgtccgcggcatgttgctgggcctggatctgccgaccggtgtcgcgcagttgcgaaagggtgttgccgatatcgcccagggcttgcaccagggttttgttgtattgcgccacggccaggtcgtagtcggcgtcgcgggcgtcgaggtcggcacgcaggcggccgccgtcgaagatcggcagcgagatcgtcggcgcaatgttgaagaagcggctggccgagccaaacatcgcatcgcccagtaacgactcggccccggcgctcgcgctcaggttgaggttggggtagaagcgcgtcttgctggcgtcgatattgcggcccgccgattcgacccgccagcgtgcggcgatcaggtccgggcggcggcccagcagctcggccggcagcaccgagggcacggcgacagcgctgggtttcagcacgttgggccgggccagttcactgccacggtccgggcctttgccgagcagcacggccagggcgatcttggcgctttgcagttgtttctctgcgtcgatcagttgcgactgagagctggcttccaggctttcggtctgctggtactggtactggctgtcgatacccgaattcagccggcgtttgctcaggtcgagcatctgccgggtacgcttgaggtcatcgttggccaggtcgcgcacgatatgggcctggcccaggtcgctgtaggccttggccacgttggcggccagggtcaggcgcgcggcctgctggtcgacctgggcggcacgcgcttcgcccaacgcggcttcccaggcagcacgctggccgccccagagatcgaaggtgtagttgaagctggcgccgatattgcgcacggtcgagtaggcatcgccctgcccgcgtgggtcctggtctttggccaggcgtgagcggctcacaccggcgctggcatccagggtcggcaggcgcgctgcgtcggcggcgtaggcggcggcttcggcctggtgggcacgggcgctggccacttgcatgtcgggactgttttgcagggcttcccgaatcaagccatcaagctgcgggtcaccgaggcttttccaccagtcggcggtcggccaggcagcgctcgacagggtcacgccgctcaaggttttaccggtttgcaatgtgctggcgtcgaggcgtttgccttgggtgtcgaggccgctgtagttggcgcaaccggccatgttcatggccaccagcaccaggctaagtgcgcgtatgttcattctttacctacccgctggatgacgatggcgtcaccggcagctatcagaattttcttgaggatccgctccagggtctgcaactcgccgggctccagggcgccggccagttcgttcatcgactgggcgccgatgtgcggcagcatgtccgccaggcgctggccgtcttcggtgagcaccaagcgcacctggcgccggtcctgctcggaacgctggcgtgccagcaatcccttttgttccaggcggtcgagcatgcgggtcatggagccgctgtccagggacaggttgcggcacagctccgccggggtatccacatcgaactgggcgatgatgatcaacaccttgaactgcgcagcggtcacgccgtgcggctccatatgggtgtcgataatgcggtccttgagcagcgccgcgcggcccaggagcaggccgaggtggcagttgcgaaaactgtcaggagtgaagtgagacatcggaagtcaccttattactgcctaggcagtgaatgtgtgacaagatgttactgcttaggcagcgaatgtcaaatggaattattagcttgcttggtagttggcggatgagtggtggggttctaaggattgcctgatggggtgtgacgccttcgctgagtaatctgcgtagccttttggccagtcgacactctccttcccatgacttctttaaaacagtttactcgcctcgcggtcatcaccctggcgggcgcgccagccgcttttgcggctaattgcacagccaccatcaacaccaacgaagcccttaatttcggtgcaagtctggccagtggcagcctgacagttcccgctgatacgcccgacggcaccgtgatttaccaggacacggtgcaatccgctcaaaacagctggagatgcacgggctcttcgcaatacggcctggtgatgaaccctacgctaggctcggtcaccagcggctcgacctaccctatcggcaagaccgggctttcgttccgcgtctggatcgacactctgagtcgctatgagactgcaccgtttacgctcaagccggatggttacggcatcaacccaggctcggtgcgcctggaaatcgtcaaatcaggtacgctggcgccgcaggtcaagatagcggccggaaacctgggcagcttgaaagccgacgacctgttcatcagcaagtacaacctgaccaacccgctggtgctgaacgccgcctcctgccagaccccttccgtccccgtcgccatgggtgacgactatcagctctgggaatttcgcgacgcaggcgcaacccctcgcactgtccgcttcaacatcggcctgaaccagtgccagaccggtatcaacaaagtcagctattcactcaaagccaccacgcccgtcatcgacgcggccagaggtgtggtggcgctcaacggcggctccaccgccaaaggcatcggcctgcaattgatggatgatgccgggcaacccatcgcgtttgataccacctactccttcagcggtttcaccaccacgggcgccaacttcaagatcccgttgtcggcctcgtattaccgcttgcccaccggcaacgtcgaggccggcagcgccaacaccgaagtcacctttatcgtgaactacctgtagcaaactaaggatcgtctgatttttcctacgcccggccacgcctagagtgccgggatgcgattaaagaactatctccaccagatcagccccgtcctgtccacgccccatgccgcacgccgcttgttgcgcatttttgcgctggtgctgctggtgggcatgctgggcggtgtgtacagcttcctgctgtttacgttcaacaacgagatctctcagcggcgcagctacatgagcagcgccatcgccgaggcccatacctttttcaccacccgtgaagccctgctggaaagcctcagcctgtcggccacacgcaaggccgaatcgaacctggcgatgaacgatgaggaaatccgcctgttgctcggcaaaatcccgggtaagcaatggagcatctggctgacccagcgcatgcgcgacttcctgaaggccaagcagctcaacctgctgtatgtcggcaccgatgcccaggtgctgcggctgtacgatgcgggtcccgcggccgccggctttcccgcgtccatgctggcgcaactcaatgccctcaagcagcagaaaaccctgcaggaactctggctgactcacaccgacggtggccattcgcagctgtacatctttatccgcctggatgaacgcgacctgaactccggctggctcggcctggagatggatgaccgtgaagtctccaactccttgagtgaccacagcgccggcgagttcaccatgttcaatgcccagggcatgcctctgttcagcaacagccgcaacccgccgcccgggcagaacctgccgcacctgcgccagcaggacttcttcggctttgtcggcgacggctggctgcccgagcaattggtgttgcgcaaacaactgaagtcgtcggactggcagctcacctactccatcgacctgcgcgcggtgctctgggcgctatggccgcagatgctcggcgccctgctgttctgcctgctgaccatcagcctggtgggcctgctgacccgccgcctggaacaccgcttcatcacccccgccatccatcgtatccaggcgctggtggaaagcgagctgttcagccgcgacgtgatccagaccgcccccgtggccctgtgcgtgctgcggcgcaccgacggcgaagtggtactggaaaacaccctggcccaacaatggctcagccacgccggcgcagagctggggccgggctggattcgtgacgccttcgatacggacaccccctgccttaccgactacttcgagactgccgacggtcgccacctgtacctgagctgtgcacccacccgctacaagggggaagacgtgttgctctgcgccttcagtgatatcagcgcacgcacccagatcgaagcggcgctggaacaggcgcgccaatctgccgatgccgccaacgaagccaagacactgttcctggcgaccatgagccacgaaatccgcacgccgctgtacggcgtgctcggcaccttggagttgctcgcccggacccgcctggatgcccagcagaaaagctacctgcatgccatcgaaggttcctcggcgacgctgctgcaactgatttgcgatgtgctcgacgtgtcaaagatcgaagccggtcaattggccctggagttgagtgagttctgtgtgcccagcctggtgcaggaagtggtgcagggttacgccgcagcggcgcagagcaagggcttgcagctgtacgcgtgcctcgacccgcaactgccgtcgcgcctgatcggcgacgccagccgcctgcgccagatcctcaacaacctgctgagcaacgcggtcaagttcaccgactccggacgcgtggtactgcgggtcaaaaagctcagccgtgaaggcgaacgggcgtgcctgcaatggcaagtctcggacaccggtaaaggcatcgcccaggaagaccaggcgctgatcttcgagccgttctaccagaccgaaggcaacccccatgtgatcgccggcaccggcctcggcctgcccatttgcctgcgcctgacccacttgatgaacggcaccctgcgcatggtcagcgagccggggctgggcagcagtttttccctgaccgtgccgctggagcaacccactggtatcgcgccgtcgctgctggcgcaggaggtggtgtatgtgctctcgcctgtgcgcgaactggccgacagcctctgcggctggctgcggcgctggggcgcccgcgcgcaggtcggcccgccgtccagcgccgagctggccccacccgcggtgctgctggaactggttgagcgcagcctggacacgccctggcacggcccacgggtcctcgccagcatcgatggcgcccacgagccgcagttcagcgaagagggctggcaggtcaacctcaacgacctgaacgcgatccaccaggcggttcgccacgcccagaacggccaggccgcgccggcccaggcacgttgcgaacggcgcgacctgcaccccttgcacctgcatatcctggtggccgaggacaatgtgatcaaccagttgatcctgcgcgaccagcttgaagaactcggctgcaccgtagaattggccagcgacggtgaagaggccttgtcgcgctggcacgaaggcgccttcgacatcgtccttaccgacgtcaacatgcccaggctcaatggctacgaactggccgaagccttgcgacgcctgggctgcaacaccccgatcatcggcgccaccgccaacgccctgcgcggtgaagatgccttgtgcctggcggccggcatgaatcactgcctggtcaaacccttcacactgcgagccttgttcactgccctggctccctacgcacgagccacccatgaagccctgtagcattttgatcgttgaagaccacccgtttcagcacctgtatttgcagaacctgttcagcgagttgggcgattttgacgtggtctgcgccagggacggtgaagccgcgctggcctgcctgaaacaacgcgacttcgacctggtgctcactgacttgctgatgcctggcatggacggcgtgcaatttatccagagcctggccgctcaaccctcgcggcccgcgctggcgatcatgagtgccgcatcacgccgcatgctgatgggtgcgagcctggtggcgagcaacttgcaagtgaaggtgatcgggttgatttccaagccggtgaatgccgccgccctgcgctgcctgatcgaccagttgcaggcgctgcgccaagtcgcaccggcccagacccagcccggcatcgattgccaaagcctgatggacgccctggacaacggtgaactgcacgcctggttccaacccaagaaagccctgaacaatggtcgcatcgtcgcggcagaagccctggtgcgctgggtgcaccccgagcatggcctgttgctgcccggcgtattcctgccggcattgatcgcctgccacctggaagaacgcctgttgtggtgcgtgttgaaacaggcgatggccgcccaagccatgtggcgccaacacggctatgacatcccggtgtcgatcaacctgcccacgcacctgctcaacagccacgacctgcccgaccgcatcctcgcgttcgtgctggaacaccagggtttgcccgcacgcctgtgtttcgagctgatggagtgctcggtgcccgatgacatcagcaatttctacgccggcgcctgccgcttgcgcatcaagggattcggcttgtcccaggacgatttcggcaagggctacagctcgtacatgaacctggtgtcagcgccgttcaccgaggtgaagatcgaccgtgcgctagtgcagggctgcaacgccaacgaagaattggcccaggccctcaccagcatcgtcagcctggggcgtcaattgggcttgatcgtggtggccgaaggtgtagaaaccgcgcaagaacttgcgctgttgcgtaagatcgactgcactcaggtccagggtttcctgatctcccacgccgtctctgcggatcagttccagcaattgctgacccacgacgggccggcgagcgcctattgacccggctgccgggtgtggaacaacaccgttagcttgcgaggtcaccgcgtcatgcatcaccccaatgccttcctggagaaactcaccagcagttcactgcgcctgaacaaaggcttgctggtactgggcgcattggcggtgctgctgctgggtatcagctacctgggagtgcagcgcatggtcaaggagcagcatgaaaccctgcaattccacttcgcccggctgatggaaaatatccacgagcaggaagccttcctgcgcgatgtctcgcggggcagtctccagggcgaactcaacccttcggccctgctcccacccgttgtgcaaaagccgctgcccgaagaagggccgaatatctatgagggtcgcgggctaccgttttccctgccctacagcttgaaaatcaacccggacaagatcaccaccgcccaataccccaaggtgttcgctctcggcacctacttgtcggcttactacagcgcgttctgggccgcctcccactatcagtcgccccaggtgatggtgatcaacggcccggacaacttcgacatcagcgtgcccgccaccggccggctgcgcgatggcggccaggtgccggtcggcgcgctgctggacgtgctgacccagttgaacgcgcgcctgcacgcacagaattcgtcgctggcggatcatcaggtgcactgggaaccctacgaccccacgcccgatgacaacgctgcgcccgtgctgctgggctatgtcgacatcaacctggcctcgaccgcgctggccatcgacggcgccaacacctgggtggtggtggcttcgctgctggacctggccaaggtgaataacatcgagcgcttgatgcagtggtcgatctacgacaacttcaccttgatcacccctgccggggttgtcctgaccggtgcagtgaagcccggccaagtgttggccgagggcgtaaatgtcacccgcgacggcctggtgttcaaactcaccagccagggcgagcaggcgtggacggcgatctacgtgatcagcctgcaacgcttcctcgactacgcgctgtggccattgctgtgtctgctggccgtggtgctggcgatgctgggctgcggccgcgcgctcaaccgttggtacacggcgcgggtggtgttgcccgcccatcaggcccacgccagcatcgctgagagcgaggcgttcagccgtgcggtcatcgacactgcgccgaccggcctgtgcgtgatccgccgcagcgatcaccatgtgctcctgcaaaaccaacgtgctcagcaatggcaggacgcacgcgccttgttcgacttgctcaaacagcagccgcacaccacgccgggccaggccgaccttgaaagtggcggccgtcacctgcacgtggcgttcgtgcccacgcgttaccagggccaagacgcgtggttgtgcgcggtgcacgatgtcactcggcatatcgaagatgccgccgccctggaagaagcgcgccaggccgccgattcagcgaaccaggccaagagccgcttcctcgcgaccatgagccatgaaatccgcacaccgctgtatggtgtgctcggcaccttggagctgctcggcctgacctccctcgcgccacgccagcaggattacctgcagaccatccagcgctcgtccacctccctgttccaactgatcagcgatgtgctggatgtgtcgaagatcgaagccgggcaaatgaccctcgaactccaggacttctgtccgctggaactgaccgaagacagcgtgcgcacctacagcgccttcgcccgcgccaagggcttgcagttgtatgcctgcatcgacgcgaatctgccggaccgactgcgcggcgacccgcagcgtatccgccagatcctcaacaacctgctgagcaacgcgatcaaattcaccgattacggccgcgtggtgctgcgtctgcgtgtcctgcaaaccagcgatgatcaggtgagcctgcaatggcaggtcagtgactccggcgtgggaatttcccaggcgcagcaacaccagctgttcgaccccttctaccaggccgaagatgccaccagccaggccggtgccggcctgggcctggcgatctgcaaatggctgtgcgaactgatgcacggccagctgaatgtggtgagtgaacccggcctgggcagcagctttaccttgcaggtcgcattgcaggtcgttcccggcagcctcaccgattgcccgacgttcagccccggcctgccgcctgtctacgtacgggcacaggaacccgaacgggcgcagcacctgatcaactggctcaatcgcctggggctgtccagccgtgcgctgtcagccgagatgccggccaacgcgctgctggtggatttcgcccaggacctggcatggcccggcccgcgcatcatcgcctccgagggcgggcctgacccggcgcaaccgtgcggtgccgactggagcgtcgatgccgacaatgcgcgcgccattgcctgggcgatccaccgggcgcagcatggcgccgaagccggcccacaccgcgtaccgtccgccaaggcgcagccactcaacctgcgggtgctggtggccgaagacaatgtgatcaacgcggccattatcaaagaacaattggaagccctgggttgccaggtggtcgtggctggcaacggcaaacaggcgctgatgcagtggctgccgggacgcttcgacctagtgctgaccgacgtgaatatgccggtgatgaacggctaccaactgaccgaagccttgcgccgacaggacaccacgctgccgattatcggggtgaccgccaatgccctgcgcgaagagggcgagcactgtgccgccgtcggcatgaacgcgtggatggtcaagccgctgagcctcgccgccttgcgggcgcagttggaacaacactgcaaggtcgaaatgccggctgtcgtcgagatgccgccgttgtcacccaggatgcgtgagctgtttgtcaccacgttgcgccatgacgtacagaccaccttgaccgcgctggacaatcaggacgccaatggcgcggcgcaacaactgcacagcatggccggcgccctgggtgcggtgcagctcggtgacctggccagcgcctttgtcgcgctggaactgcgcctgaccggcatggccgtcacgccggccctggccttggaagtacgacagcacctggcgcggctcagcgcattgctcgacactcttgaataacttcactctggataaaaaacccatggaaaccctcaacgtagtcatcgcagacgatcaccccatcgtgctggtcggggtgcgggaactggtcgaacgtgatgagcgctttcgcgtggtgggcgaagccgtgtgctccaacgaactggtgaagttgctggaaaacaccgaggtggacctggtgatcaccgatttcaacatgccggcggactcgccctacggcgatggcctgaagttggtggagtacctggttcggcacttccccaaagtgcgcgtgctggtgctgaccatgatctccaacccgctgatcctcacgcggttgcaggagctgggtgtactcgccgtgatccagaaaaaccagctgcacgtggaaatccaggctgcgctcaaggccatcgcgcgcggcaacccgattcgcagcaaggggccgcagccgacctcggtgctggagtcatttgatctcgaccagcgcttcacccggttatcgcccaaggagcacgagattctgcggctgtttgtctccgggcaaagtgtcaacgagattgcccgtgggttgaaccgcagcgccaaaaccatcagcacgcaaaaagtcgcggccatgcgcaagttggaagtcagcagtgaccaggacttgctggcttattgcatagagcgcaacttgtttaactaacacccacttctagggatcgtctgatgtccccccccaaggcctgcgccttattgtgttgttttaaccccaagcatggaaaaacaacatgaaacagctctctcgcgcactcttggctctgtcggtatttgccgcagttaatacatttgccgccggtgaacccaccgcaccaaccaaagccggtagcggcaccattagtttcaccggcagtatcaacaatgatgcctgttccgttgaagggattggcctgaacaaaaccatttcgatcaacatgggcgaagtgtcgatcaaggacatgggcaccgcgaccgcgccaaaaggcagcggtaccctgagcgccgagaacttcgacatgaagatcagctgcaacgccggcaccaaggtggcaatgatcttcgaaccgaccaaaggcgcaggttcgggcatcgtcgccggcaccaaagtgctgaagctgatcgacggcctgggcgccgccaagaacgtcggtatcgccctgctggacagcaacggtgcgttgatcgacctgagctcgccgaccaccgcgaagatcgaaaacaccctgcaagacagcaacaccacgctgaaattctcggccgcctacgtcaccacagccgacgctgcgactgccgtagccggtcgcggcgacgccaccctgccgttcaccctgcaatacgaataaccccagcgtcgcggggccttcgggcctcgcacactcttcgaacgtagcggtagccatcatgttatttcgtcattctctatccctctgcgcgggcctgctgggcctgttcgcggtcagccaggccacggccggcatttcgttgagcagcacacggctggtgttcgacggccagcataaagaagccggtatcacggtgcgtaacaacggtgaagacgtgctgatccagtcctgggtcgataccgacactgacagcacggtgccgtttgccgtgaccccaccgctggcgcgggtcacggccaatgagcaacagctgttgcgggtgatttatgccggcgcgggcctgcccaccgaccgagagtcggtggtgtggctcaacgtacaggaagtccccaaggcatcgaaaacccagaacaccttgcagcttgccgtgcgccagcgcatcaaggtgttctttcgccccgccggcttgaacaacaacgcttacctggcaccgaccgaactgctttggcagttggccgagcacaacggcaagcacgtgctgcgggttaccaacccgggggtttatcacgtgtcgattgccgacattaccctgcaagccggtgccgtcagtgaacacccgttcgattcaatgatgattgcgccgggtgaactaaaagagttcaaccttaaacaacttaattccagccagccggcacgcttgatattcggcagcattaatgactatggcgcacaagaccgttattccacgcaactggttaacggcgcgccaacttcagccagtttgaacacagaatcaccataacgcgcctgccgttcgcgcagccgcactttcactgtatttctcttcgctccgttagttcgtatcggaggtgatatagggttcctgcatgtttttattcaagcgcgatggattggcgccgttattgattgccctgggcttcacttcagtgtgccaggccgatggcgacgaacaattcaatacttcgtttttgcaaggtgcggcggctgacgtcgacttgcacacactgctcgccagcaacagcgtgctgcccggcaattaccgggttgacctgtacggcaatgaaaccctggtgggtcggcgagatatcgactttcgccgcaacccgcaaaacggcaaggtcgaggcctgcctgaccctggagatgctgcagcaagtgggcgtcgatatcggcgcattacaagccagcggcaagctcgtcgataccgacccgaatgcctgcctggacctgcccaccttgatcgagcatgccagcgtgcgctacgacgtaccgcgcctgcgcctgctggtcagcgtgccgcaacgcgccatggaacgcgggcggcgtggctacgtcgaccctgcgctgtgggacgaaggcgtgcccgcggccttcgtcaactaccaactgagcagcaaccgcaacagcaccgatgccgataccacgctctcgaacaacctgggcctgcgcaacggcatcaacctgggcgcgtggcgcctgcgcaacgagtcgaacttcaacagcagcaccgaccgccccagtacgttcaagagcaaccgcacctacctgcaacatgacgtgacggccttgaagggccagttcagtgccggggatattttctcggacaccgacctgttcgacagcgtgcgctatcgcggcctcaagctggcgtccgacgatggcatgcgtgccgacagcgagcgtggctacgcgccgatcatccgtggcattgcgcaaacgagcgccacggtggaaatccgccagaacaattacatcctctacaccgccaacgtgccaccgggcccgttcgagatcagcgacatttaccccagcggctccaacggcgacctggaagtgacggtgatcgaggctgacggccgtcgccgggtcacggtgcaggcgttttccagcctgccgatcatggtgcgcgaaggccagttgaaatacagcctctccgccggccagtacaacagcaatgacgacgggcaagaaaacccgcagtttgtcagcagcaccctggcctatggcatcagcagcaacctgtcggggatcgtcggcgtccaggccacgcaggacttccaggcgttgtccgtgggggcaggacgcaacacgtcgatcggcgcggtatcgctggatgtgacccactccgtcagccgcaccttcggccagcaggtcacgggtaacagcgtgcgcgcgttgtatgccaagacctttaccggcaccgacaccaacttcaccttggcggcctatcggtattcgaccgagggctatcggaccctcaccgaccacgtcgaggaactcagcaatgagggccagaaacgcaccggcaactccaagacccgcaccgacctgaccatcaaccagagcctgggccgcaaccagcagttcggcagtgtctatgtgaatgccagcgaccagcgctactggggacgcggcggctcgcaaagtctgtcggcgggctacagcaactactggggcgacgtgagctacaacctcagcgccacgcatacccaggacgtgggcaactacggggcatcgaacaacgacacgctgatcaacctgtccgtgtcctttccgctgggttcaaagccgcgcgcgccgagggcattcatgtcggccagcacgcaaaaaggcagtgactccacgcaactgggcgtcaacggctacctgaccgaaaacagcgacacctattactcgctgcaagccggtaacagcagcacgggcggtagcaccggttcggccaacctcagcacccgcacctcgctgatggacatcagcggcggctacagccagggccgagggtacagcgcgcagaacctcaacgtggcggggtcggtggtagcccacgcaggcggtatcaacctgggccagaccgtgggcgagacctttgcgctggcgcacgtcgacggcgtgcagggtgtgaagatcggcagcttctccggggcaaagaccggccgtaacggctatgcggtgatccccaatgcgcaaccctaccgcgtgaactggatcagcctggacacccgtgacctgggcgctgacattgaaatcgataacgccacccagcaggtcgtgcctcgccgtggggccgtggtagtggcccgctataccagcaagagcgggcggcgtgtgcagttcgcgttgttcgacgcgcatcacaagcccatcccgtttggtgcgtcactggagagtgttgcgggcaagcagatcgcgatgtccgaccctagtggcaaggcattggcattgatcgaagaggatgccggtacgctggtgatcaagtggggtgagcagcactgccaggcgccgtatacgctgggcgagcgcaacaaggcgctgaactatgagcaggtagacctgacctgcttgccacaacgctaaaaacaccagagaacccatgtgggagggggcttgcccccgattggggtgtatcagccaacttatctgtggccgacccaccgcaatcgggggcaagccccctcccacatttctgtacctgtgtggcttagaaatcgcgtttatagaagatatccaatgagctggccacaccgctcgccacttccaggtacaccttcttgctcaacaggtagcgcaaggcaatggtgctggccggttcgaacacgcctaccccataccgcaggctgagtttctcggtgatcttgccgctggccaccacggcggtggtgttgccgctgccctgggtgtcgagttcgaagtcctggatgcccaggttcttcgccaggtccgaggtgacccccgcgctgcccatcaagccgaggcccagcgcagcctgggccagcatgttgttgtcttcaccggtggtgctcagcggacgccccagcaccaggtaggacagcgcttgttcctggctcatggccggttcggagaagatttgcgtggtgggctgttccgcgctgccgctgaggcggatacccgcgaccacatcgccggtcttgcggatcgcttcaatatccaggaacggttgatccaacggcccggcgaacaacagccgcgcacgccgcacatcgagcttctggccgtaggcgcggtagcggccgtcgttgagccatagctcgcctcgggtgtcgaggttgtcgccgatgtgcacctggccctggaccttggcggtgaggccgaagccggagaagttgagcttgtcttcgcccacaaccacgttgatatccatggccattgccatcggcggtttgccctcctcggtctggctgccgatgatcaccgtgtcatccgagaccttgaccgtcgacggtggcagctcgcgcacggtgatgtcgccgcgtgggatatgcacgttgccggcgatggccaatttgtcgttcttcaggctgattttcaggtccggtgctacttccagcaccgcgtaaggttcgaccgtgaccggcaactgcgagccttgcaaactgaggtccaccaccagcgccttaccccagtcgacctgccccttgaggctgccctgcccggccttgccactgcgccaggcgccgttgagctgcacactttcgccggcaatcagcgcctgcacattcaggccttccaggctgatgggcagttccggaccggagatctcaccgcccaccaggttgacgttgccgttgacctggggcgccagcaagccgccggacagacggccgttgccgttgagcttgccggtgagtttctccaccatcggcacaaacggccgtgctacggcaaggtcgaggccgacgaggctaaagttgccggttatgggtttgttcttgggtaacgggttgatctgcgcctgcaacaacagttcgccgagcttgccgccctggaagttgagctgagtgtcgatacgcttggggttgagggtggtttcaagtttcagggtgttgtagggaaaatccagccactggtccttgtccttgacgcgcaaggtgccaccactggcgtccaccatcaccacgcccttggggccactggccggcaggtccagttgcaggtcggcattgagcttgccctgccaggcgaaatccttcggcaggaacgccgccaggctgtcgatggggaattgcttgaggtggtaacgcagcttcggctcgggcatcaggcgctggtcttcgccgcacaggctggccggcccggacacccagcagtgcgcggcaaaggtcagcctgccatcagccatgcgttcgatcctggccggggcttgcagcttccagtcctggccaccggcttggacgtcgccactggccaagcgcccgcgccagttgcctttgtcgaggttgccgtccaatgccagggccagcttgaccagcgggccgaccaggtcgagctggaccttctggttcttgatatcgccctgggcactggcggtcagggtgccgacctgggtctcgccggattggataccgctgcccttcaggtcaatcttggcgcgctgggcactgtcgagactggcgtcgagggtgaggctttgcaggcggttatcggcaaacgccagttgctggcccttgaggtcgagtttgccttggggcgccttgaggctgccagccacgtcgagtcggccattgacctgcccgcgcaactgcggccacaactgggccaggcgcgtcagtttgatgtcgatctgcccggccaggcgttgttgcaggctgccactgccgttgatgcggttgtcgcccaggcggatattcaggttggccagggtccactgctcacccgcgccttcggccttggctgccagcacggcggtttgcccgcgcaggcggcccttgaggtcgaggtcggcattcagcttgagctgctcgtgcttgaactcgcccttgctgcgcagcggcccggccagggtgccgggcaattcggcgacccagtacgccgggttcagcgcagacaggtcgagtgccgtgtcccaggcgatgccatcggcgaattgcagattcaggtggccctcggccttgccctggccggcggtgagtttcagctcgggcaggaagatttgcttgaggtcgccactgaacggcgtgaccacgttgaacttgcctgcggggccgtcgaggtcggccttgaggttgcccaggtagttgccatccttgtaggagatctcgccattgaatgtacgcagtgcaacttggggctcatcgatgacgggataaaggcgatgccaggggaagtccagccagtcgaccttggcgtcagcgctgaagccttgttgccagtccaggttggcgctgagtttcaggctttgcttgtcgtcgccatacaggtcgagtttttcgatctgcgcccctttggcatccacgcgccccagcaacaacaggcttaccgggctcttttcggcaggcagcgacgccttgcccgagagcacataaccggttttcaggtcgcccttggccaggagcaccagctcattgagttgcagggtgtcaggcaaaccggcatccggcttgaacgcatcggacttgatcagcacttgtcccggcagatcttctgccagcggttgcaactgcgccagcaggctgccgtccaggtagccatggctatcgccgttgacggtgagggtcttgagcaagtcgccttcgactttgaggccaaccgtccactgttcaccaccgggcgcgtaaggcaggctcaagttaccgctggcgttcaacggccagtcgccggtgggttgcagcagaccagccaggtccagcaccaggccatcgcgttgcagatgcaccgaatcaatttgcatgcccgcggcggtccagtgcgccgccagttgcaggcccttgagttcttcgctgccgttgaacagcaggctgccgacgcgaacatcgcccaactggatggccagcggcagtttcagatcgggtagttcgatcgggccgctgctctgctcggtactgggagggaattgcaggctgacttgctcgacatccagttgattgatgcacagggtcatgcgcaacagacacgccggcgaccaatccagcttgggcgcctggagttcgacacggctgctgtcctgctgccacagcagatggtcggcgctccactggccacccaaatgcccctggaaattctccagggtcaaccccggcacgcggcccaatgcccagcggctgcccgcctgggtgcccagcgccgtccacagtgctagcaacaacacggcaaggctggccaccacggccagccccgctattttcacaccacgcatcacagctcaggccccatggaaaagtgcaatcgaatgccgcccgggtcttccagggcatgggccaggtccagacggatcgggccgaccggcgacacccagcgaataccgacgccgacgccggttttcaggctgggcaggtccagattgttgaaggagttaccctggtcgatgaaggtcgcgatccgccatttctcggcgatggaatattgatactcggcgctcagggccaccatgtagcggccaccaatacggtcgccgcgatcgttctccggcgacagcgtctggtactcgtagccgcgcacgctctggtcgccaccggcaaagaaacgtagcgacggcggcaccgagttatagccgttggtggcgctgccgcccacctgcgcacgggccaggaagcgatggttgtcccacagcgtcgtcaggcctttgaccatggccgtgccgtaaagcaggttggtatcggagcccaggccttccttggcgactttggtgtcgaattgcaggcggtagccgttgtgcgggtcgatacggttgtcactgcgcaggtaggagtagctgatccctggcatcaccaggttactcaggccggagtcattgcccaggcgatattcttcacgctggtacttgagcgaaatcacccgggtccagccgctgggcagcttgctgtgccactcggggcccacggtgagcaatttactcagggtgtcggtgttggcgatctcttcgttctgatagccaccggcaaagcgcagtttgtcggtgagcggtgggtccagtggaatgtcgtaccacaggccgacgttctgtcgcggcgccgacagctcggcttcccaaccatagctatggccctgggggttgacccagtggcgggtccagttggctttgccgcgcgggccgacgtcggtggagaaacccaggcccaggcccatggtgcggggtttgcgggtctccaggcgcacggccaccgggatgatgtcattggttgaagccgccggggcggcgtccacgcgcacgccttcaaaaaagccactggcttgcaggttctggttgagttcggcgatcagttcggaatcatagggcgtgccgcttttgaacggcaccatgcgttgcagcagctcttcgtcaaacggcgtgtcgccggcaaagctgaccttgcccaaggcgtaacgcggaccgctgtcatagatgagttcgatatcggcgacaccggccttggggtctaccgctagtttctggcgggtgaagcgcccattgaaaaaaccgtagcgcgaggcctggttctggatcaggcgcttggcgtcttcgtaatggccgtggttgagcacagcgccggccttgaggtcgttgctgacgggcacgcgaaaggtcttgaggtctgcggcggggccgtcgacccgtatggtcacgttgcgcaaatgcaccggttcgccggggtcgatggtgaggatcaggcgcgggttcttgccgcctttcacctcactgtcgatttgtggctgatagaagccaagggcctgggcggctttgcgcgcctgctcctcggcgccacggctgaaccgcagcaaggcctcttcatcacgatcgcccaccccgccgatatagccttcgatgttggctttcaacgcgtcgtttgagggtttgatccgcacgtccagttcgctttgcgccaacgcgccgcagcttgtgaacagcagaatcaagccgctggtaaatcttcctggaaacttcataggcgcggatgctacacgagcaagggagactctttgaactcggatttatctgaataattctggattaagccgttgcagcatgtaacgactgcggattcggatggaaaaacacatgctcgaggaccgggcctaccgccacttcaccgatttcctcgtagccctggcgtttatagaactccagataacgtgaattccccgtgtccagcaccacaccggacgaatgcgggtcttcggcacaccaattgtgcacggcttccagtaactgctcgccgtaatgcttgccctggaattgcgggtggatgcccagcaacggcagcacatgcaccgactcactgggcaggcacgccagcaccgcgtgatggtagtcgaggtaacgccgtgtaccgcgcacgccggtactcagccacatgcgcagttgccaggcccagctctcggtgatgcccaggcgccgctgcggtggcgcgatcagggcgatgccgatcaggcggtcattgacgaacaaaccaatggccggcagtttctgaaagaagtgctgcttgaccaactcgcgcacggtggcgcgtacccgttgttcataaccaggacgctcggcttcgaagatgtaggcgaaggtcggctcgtgccgataggcctggtacaacagggatcgggcctcgcgggaatagccgctgttgagcaggcgaatttcagcaattgcagttgtagtgtccggcataccgtcaatctccctgggcgcggctcaaaaggcagcgttcttatgggtacgaacctacacagcacgagtcgttcccagacattagcagtgcatgtgccctaccgccacgctggcccccgtccgacttgtccgctagcatcgcccttttgccagaccggactgccgaccatgaaaatcgtctccttcaatatcaacgggctgcgcgcccgcccacatcagttggcggcgctgattgaaaagcaccagcccgacgtgatcggcttgcaggaaaccaaagtccacgatgaccaattcccgctggctgaggtacaggcccttggctatcacgtgtactaccacgggcaaaaaggccactacggcgtcgccctgctgtcgcgcaaggaagccctgagcgtgcacaaaggctttgccagtgacgaagaggacgcccagcgtcgctttatctggggcaccttcgccgacgagaacggccacccagttaccatcatgaacggctatttcccccagggcgaaagccgcgaccaccccaccaagttcccggccaagcagcgcttctacgaagacctgcagcaactgctggaaagccagttcagcaacgaccaggcgctggtggtgatgggcgacgtgaacatttccccggaagactgcgacatcggcatcggcgccgacaacgccaagcgttggctcaagaccggcaagtgcagcttcctgccggaagaacgcgaatggatggcccgcctgaaaaactggggcctggtggacagcttccgccacctcaacccggacgtggccgaccgcttcagctggttcgactaccgcagccggggctttgaagacgagcccaagcgtgggctgcgcatcgacgtaatcctcgcctccaatggcctgttggcgcgggtcaaggatgccggggtggattacgagctgcgtggtttggaaaaaccgtccgaccatgcgccgatctggctggaactgagctgatcacaccctgtgggagggggcttgcccccgatggcagtgggtcttcagcccatctatagctgacacgccgctatcgggggcaagccccctcccacatttagccttgcggcgcgtacgtcatatttatgcaacctgtctgacttattctcgcggcaccccctttggcttgagaaggtgccggcatgaggctgcgcgttctgttactgctgactgtttttcccctcttcgccgtttccgcctccctgcccgttcctgatcaaggccctgctttgcgcatccagggctccaataccattggcgcggcgttgggcccggcactggtcaaggggctgatggagcatcagggcttgcaggcggtgcacaacgaaccgggcgaaggcgccaatgaacagcgtgtgatcggcaagacgcgccaaggcaagaccgtgaccatcgaagtcgcggcccatggttcgagcaccgggttcacggcgctgaaaaaagccagcgccgatctggccgcctcgtctcgcccgatcaaggacaatgaactggtcgaccttgaacccctgggcgacctgaaaagccccgaagccgaacaagtgattgccatcgacggcctggcgatcatcctccacccgcagaacccgttgaacacgctgaataccgagcaactggcgcagattttcaatggtgaggtcagtacctgggaggcactgggtggagtgggcggcctcattcatgtgtacgcacgggatgatcaatccggcacctacgacacgttcaaggaactggtgttgcgtttgcgtggcaagccgcttgcatcgggtgccaagcgcttcgagtccagcgagcagctgtccgatgcggtcagccacgacccgcagggcatcggctttatcggcctgccctacgtgcgccaggccaaggcggtggcgattgtggacggcgactcacagcccatgttgccgctcaacagcctgattgctaccgaggattacccgctgtcacgccggttgtttttctacctgccgccgtccgggcgtaacccgtgggccaaggcactggtggactttacccagggcaccaagggccaggcgattgtggccgccaacgggtttattgcgcagcaggtgcaggcgatcgccgtgcaaccgcgcccgtcgatgcccgaggactaccaggccatcgcccgcgaggcccagcgcctgacggtgaattttcgctttgaagaaggcagcgccagcctcgacaacaaggcgcgccaggatctgcagcgggtggtggcctatctgaaacaccacgacaagttaaataagcaggtgacgctggtgggctttggcgatgccaaggatgacccgcagcgcgccgcgttgctgtcgaagctgcgggcgatggcggtgcgccgggagttggtcaagaacgccgtggtgctgcgcgatatccgtgggtttggcgcgcagatgccggtggcggcgaatacggcggatgaggggcggatcaagaatcggcgggtggaggtttgggtttactgaagactgatggagcttcattgcctgatccgactgcatcgggggcaagccccctcccacattttgatctgtgaacacatccaagtgtgggagggggcttgcccccgatgcaggcgacccgctgttactgcccgctgcgcatcagctctttaggcacatacttgccaatctcgaacttgccgatggccgcccggtgcacttcatccgggccgtcagccaggcgcagggtgcgttgcatggcgtacatgtaggccagcgggaagtcgttggacacgccggcaccgccatggatctggatcgcgcggtcgatcaccttcaacgctacgttcggcgccaccaccttgatctgggcgatttcgcttttcgccactttgttgcccacggtgtccatcatgtacgccgccttcagggtcagcaggcgcgccatgtcgatctccatgcgtgagtcggcgatcttgtcgatgttgccgcccaaccgggccagcggtttgccgaacgcggtacggctgaccgagcgtttgcacatcaattccagcgcgcgctcggccatgccaatggagcgcatgcagtggtggatacggcctgggccaaggcggccctgggcgatttcaaaaccgcggccctcgccaagcaggacgttctcatagggtacgcggacgttgtcgaacagcacctcggcgtggccgtggggcgcgtcgtcgtagccgaacaccggcagtgggcgcacgatcttcacgccgggagcgtccaccggcaccaggatcatcgagtgctgctggtggcgtggcgcatccgggttgctcaggcccatgaagatcaggatcttgcagcgcgggtcgcaggcgccggaggtccaccatttcttgccgttgatcacccactcatcgccctggcgttcggcacgggcggccatgttggtagcgtcggaagaagccacgtccggctcggtcatggcgaacgccgagcggatctcgccgcgcagcagcggctccagccagcgtcgcttctgctcttcattggcgtagcgcaccagcacttccatgttgcccgtgtcgggggcggagcagttgaacggctccgggcccagcagggaacggcccatgatttcagccagtggcgcgtattcgaggttggtgaggccggcgcccagttcggattcgggcaggaacaggttccacaggccttcggctttcgccttggctttcagctcctccatgattgcggtgggctgccagcggtcgccttcgctgacctggcgttcgaacaccggctcggccgggtaaacgtaagcatccatgaacgcagtgacacgttcacgcagttcctgaaccttgggcgaataggcgaaatccatgagcagctcccttctctgagaggttgtttaggtcatgcaatcgatgctagaacagcgttgataatttacctagcctattctcggcgtgtattaacattcatcaccgatatatgatcgacgtatggccacctaacaataagagcgctgcgaaatgaatctgagcaaggtcgacctcaacctgtttatcgtctttgatgcgatctacaccgaagccaacctgacccgcgccgggcagattgtcggcatcacccagccggcggtgtccaacgcgctggcccgcctgcgtgagaccttcaacgacccgctgttcgtgcgcaccgcccagggcatggtgccgacgcccatggcgcagaacatcatcggcccggtgcgcaatgcgctgtcgttgctgcgggtgtcggtgcaggaaagccgcatcttcaacccgcagcaggcggccaagacttaccgcatcagcatgaccgacctcaccgaggcggtgatcctgccgctgctgttccagcgcctgcgccgcctggcacccacggtggtgatcgagagtttcctgtccaagcgccgcgaaaccaccaaggaactggccgccgggcgcctggattttgccgtggatgcgccgctcaacaccgacccgcaggtacgccacgtcaagctgatggaagaccgctacgtgtgtgccatgcgcaagggccatcccatggccggcaaagacaagctcacgctggatgactacctgtcgctgacccatatccatatctccagccgccgcaacggcctgggtcatgtggacctggcgctgggcaagatgggcatccagcgcaagatcgccctgcgctcccagcattacctgatggcctcgcaggtgctgcagcagaccgacatggtcatgaccgtgcccgagcgcttcgcccgccgccatgaactgcactggttcaacctgccggtcaacgacgtgccgccggtggaaacccacctgtactggcacgaaagcaccgaccaggacccggccaaccgttggatgcgcgagcagatgatcgagttgtgccagcaggtcaccgcccacgagaagaaactcgataaacaacaggcgtgaggttgaagcgccggccctgtgggagggggcttgcccccgatgggtcgcgcagcgacccttgacgtttacgtcaacctgccagtagcttaacgccaagacctccttgagcgcccccatgagcaccacctacagcatctccgacctcgcccgcgagctcgacatcaccacccgcgccattcgcttctacgaagaacaaggcctgctggccccggaacgccggggccaggagcgcatctactcggcccgcgacaaggtcagcctcaagctgatcctgcggggcaagcgcatcggtttttccctggccgaatgccgcgagctgatcgaactctacgaccccaccagcggcaaccacgtgcagctcaacagcatgctggcaaaaatcgccgagcgccgtgagcagctggaacagcaactgctggacatcgaacagatgaagctggaactcgacaccgccgaagagcgctgcactcaggccctggcccacaccctgcgccaggccgaccactgatcagaaggtaaccgccatgtccctcccctcacacgtacgcctggtggaagtcggcccgcgcgacggtttgcagaacgaagcccaacccatcagcgtggcggacaaggtccgcttggtggatgcattgagcgcagccggcttgcgctatatcgaggtcggcagtttcgtttcacccaagtgggtgccgcagatggccggttccgccgaggtgtttgcgcagatccagcgcaagcccggcgtgacctatggtgccctggcgccgaacctgcgcgggttcgaggacgcactggcggcgggcgtaaaggaagtggcggtgtttgccgccgcgtccgaggcgttttcccagcgcaatatcaattgctccatcagtgaaagcctggagcgctttgcgccgatcatggcggcggccaggcaatacggggtcagcgtgcgcggctatgtgtcgtgcgtgctggggtgcccatacgaaggcgagatcgcgccggaacaggtcgcggccgttgcgcgggaactctatgccatgggctgctatgaagtgtcccttggcgacaccatcggcaccggtacggcaggcgccacgcggcggctgttcgaggtggtcgcagcccaggtgccacgggacaagctcgccgggcacttccatgacacctatggccaggccatcgcgaatatctacgccagcctgctggagggcatcacggtgttcgacagctctatcgcgggcctcggcggctgcccgtatgccaagggcgccagcggtaacgtcgccaccgaagacgtgctgtacctgctcaacggcctgggtatcgagaccggtatcgaccttgaggcattgattggcgcggggcagcagatcagcagcgtactgggccggccaacaggatcgcgtgtggccaaggcgcgtaacgccggttgagtagcttagccgtgacaatgtgttaccgcacgcctacacgtcgagtaacacgggaacatattttgtcgtatttgccgtaggccaaaccccacacaaaaatcaactcattgattttaaaggaatttaaaaagttggcacggcttctgctatctctatggcataacaagaataaaaagcgccaaacctaataaaaataagacgaaacgactctgatataacaaaaacaatacggcagagacgcagctaacagatttttttggagaagatgtgcttcgcagggtacggcatgacgaaacccgcaaccggtcagagaaaaataaaactacctcaggtagctgcccactggttggatcgattgcgaagaagcagatcagcgctcaaaaaaatacgtttgctcttgaccccggatgggggtcgccaaaaacagcggtaaagggtaacggttgccaaaaacaacaatagaccgcccctcaataataaaaaaagagcacgcaacgacaaattaaaggggaccctcgggtcccctttgtgctttcagggatttattcctgccctgcccccaactcttgcatggaaatctcgcgcatgcggaatttctggatcttgcccgtcaccgtcattggaaactcctctacgaacttgaagtgcttgggcgtcttgaagtgcgcgatgcggcccttgcaccaggtttgcagctccagctcattggcgacatggccggggtggaacttgatccaggcgacgatggcttcaccgtagcgcgcgtccggaatgccgatgacctgcacatcggctacagccgggtgggtaaagaaaaactcttccaactcgcgcgggtatacgttctcgccgccacggatgatcatgtccttgttgcgcccggcgatgcatacgtaaccctgggcatccatgctcgccaggtcgccggtgtgcatccagccggcgtcgtcgatggcctcgcgggtggcgtctgggttgttccagtagccgagcatcacgctgtagccacgggtgcacaattcgccgatttcaccgcgcgcgagggtgttgccgtcggcgtcgatgatcttgttttccagctgtggctgggtgcgcccgaccgtggtcacacggcgttccaggtcgtcgtccgctccggtttgcagcgacaccgggctggtctcggtcatgccgtaggcaatctgtacctcgcgcatgtgcagctcgctgatgacccggcgcatcacttcgatggggcacgtggcgccagccatgatgccggtgcgcaaggtggacaggtcaaagtcgcccagctgtgggtgatcgagcagggcgatgaacatggtgggtacgccataaaggccggtggcgcgttcttcggcgacggtggtgagggtcagcagcgggtcgaagccgtcgttcggatagatcatggtggtgccatgggtgatgcagcccaggttgcccatgaccatgccgaagcagtgatacagcggcaccgggatcaccaggcggtcttgcgcggtcaggcccaggctttcgccgaccatgtagccattgttgaggatgttgtggtgactgagggtagcgcctttgggaaagccagtggtgccggaggtgtactggatattcaccggctggtcgaaatgcaggctggcttgccggctgtgcaactgttcgggcgggacgccagccccgagcacggccaattgcgaccagggcatgaaccccgcgggcgggttgggatccaggctgatgaggccacgcacgtccggtttcagctcgtgcagcatggcgtggtaatcggagctcttgaatgagccagcacacaccagcaactggcaaccggactgcttgagcacgtagtccaactcactgctgcgataggctgggttgatattgaccaggatcaccccgagcttggcgctggcaatctggctgatgcaccactcggcgcaattgggcgcccagatgcccaggcggtcgcccgtctgcatgcccagggccatgaacgcccgcgcgtgcaaatccaccgtctcggccaactgccgccaggtgtagcggcgttgttgatggcgcaccaccagggcctcgccatcgggatactgcgcaactgtgtgatcgaaagcctggccaatcgtcatggccagcaaggtcttgtcctgtgagccacggctgtagctctgattcggttgatccataacgacccctgttgtcttttttgtaggttgacgtaaacgtaaactacgattgacagcgccgtaacgcaagcttacgttaacgtaaaggtgagcgccctcccctggcgccccatctacacaacaacaatgctcacattaaggtgcctgtccatgagttacccgtccctgaacttcgccctcggtgaaaccatcgacatgctgcgcgaccaggtgcagtcctttgtgggcaaggaaatcgcgccccgtgcggcgcagatcgacatcgacaacctgttccccgccgacctgtggcgcaagttcggcgacatgggcctgctaggcatcaccgtgcccgaagaatatggcggcgccggcctgggctacctggcccacgtggtggccatggaagagatcagccgcggctcggcctcggtggcgctgtcctacggcgcgcactccaacctgtgtgtaaaccagatcaaccgcaacggcagtcacacacagaaactcaagtacctgcccaagctcatcagcggcgaacacatcggcgccctggccatgagcgaaccgaacgccggttccgatgtggtctcgatgaagctacgcgccgataaacacggcgaccgttacgtactcaacggcagcaagacctggatcaccaacggccccgacgccagcacctatgtgatctacgccaagaccgacctggaaaagggcccgcacggcatcaccgcgtttatcgtggagcgcgactggaaaggcttcagccgcagcaacaagtttgacaagctgggcatgcgcggctccaacacctgcgagctgtttttcgatgacgttgaagtgccggaagaaaacatcctcggcgtgctcaacggcggcgtcaaagtgctgatgagcggcctcgactacgaacgcgtggtgctctccggcggccctaccgggatcatgcaggcgtgcatggacctgatcgtgccctacatccacgaccgcaagcagttcggccagagcatcggcgaattccagctgatccagggcaaggttgccgacatgtacacccagctcaatgccagccgcgcctacctctacgcggtggcccaggcttgcgagcgtggcgagactacgcgcaaggatgccgccggggtgatcctctacagtgccgaacgcgccacgcaaatggccctcgatgccatccagattctcggtggcaatggctacatcaacgaattccccgccgggcgcctgctgcgcgacgccaagctgtatgagatcggcgccggcaccagtgagatccggcggatgctgatcggtcgcgaactcttcaacgaaacccgctgaaggagcgctccatggccaccttgcacacccagctcaacccgcgttcggcggagtttgccgccaacagcgcggcgatgcgccagcaggtcgacgccctgcacaccctgctcgcccacgtgcagcaaggcggcggcgccaaggcacaggagcggcacacctcacgcggcaagttactgccgcgcgaacgtatcaatcgtttgctcgacccgggctcgccgttccttgaactcagccaactggccgctcatcaggtgtacggcgaagacgtgccggccgccggggtgatcgccgggatcggccgcgtggaaggcgtcgaatgcatgatcgtcgccaacgacgccacggtgaaaggcggctcctactacccgctcaccgtcaaaaaacacctgcgcgcccagaccatcgccgagcagaaccgcctgccgtgcatctacctggtggactccggcggcgccaacctgccgcgccaggatgaagtgtttcccgaccgtgagcacttcgggcggatcttcttcaaccaggccaacatgagcgcccaaggcatcccgcagatcgcggtggtgatgggctcgtgcaccgccggtggcgcctatgtgccagccatggccgacgaagcaatcatggtgcgcaaccaggccactatcttccttgccggcccaccgctggtgaaggccgccaccggtgaagtagtgactgccgaagacctcggcggtgccgatgtgcactgcaagatctccggcgtggccgaccactatgccgacagcgatgagcatgcactggcgctggcccggcgcagcgtggctaacctcaactggcgcaaacaaggccagttgctgcaacgctcgccagtcgcgccgctatacagcggtgaagagttgtacggcgtgatcccggccgacgccaagcagccgtttgatgtacgcgaagtcattgcacggctggtggacggttcggtgttcgatgaattcaaggcgctgtttggcaccaccctggtgtgcggctttgcccacctgcacggctacccgattgcgatcctggccaacaacggaattctgtttgccgaagccgcgcaaaaaggcgcgcattttatcgagctggcctgccagcgcggtattccgctgctgttcctgcagaacatcaccggcttcatggtcggccagaagtacgaagccggcggcatcgccaagcacggcgccaagctggtcaccgccgtggcctgtgccaaggtgccgaaattcacggtgatcatcggcggcagctttggtgccggcaactacggcatgtgtggccgcgcctatgacccgcgctttttgtggatgtggccgaacgcgcgtattggcgtgatgggcgccgaacaggcggcgggtgtgctggtgcaggtcaagcgcgagcaggctgaacgcgccggcacagcgttcagcgccgaagaagaggcggcgatcaagcagccgatcctcgaccagtacgaaacccagggccacccctactactcgagcgcgcgcctgtgggacgacggtgtgatcgacccgttgcagacccgtgacgtgctggccctggccttgtccgctgcgctgaatgcccccatcgagccgagccgcttcggcgtgttccgcatgtaaatggagctgtaccccatgagcgatttcaacaccctcgaactgatcaccgacccccgtggctttgccacgctgtggctcagtcgtgaagccaagaacaacgcgttcaacgccgagatgatccgcgaactgatcatcgccctcgaccgggtacaaggcgatccgtccctgcgcttcctggtcctgcgcgggcgcggcaagcacttcagcgccggcgccgacctggcttggatgcagcagtcggccgagctggactaccacaccaacctggacgatgcccgcgaactcgcggagctgatgtacaacctggccaaactgaaaatcccgaccctggcggtggtgcaaggcgcggcctacggcggtgcactgggcttgatcagttgctgcgacatggcgattggcgccgatgatgcgcagttctgcctgtcggaagtgcgcatcggcctggcgccagcggtgatcagcccgttcgtggtacaggccatcggcgaacgtgcggcgcggcgctatgccctgaccgccgaacgctttggcggccagcgagcgcgcgacattggcttgctggcggaaagctatccgatcggcgagctggaccatcaggtcgaacagtggatcgccaacctgctgcacaacagcccggcagccatgcgcgccagcaaagacctgttgcgcgaagtgggcaacggtgccctcaccccggcgctgcgtcgctactgcgaaaacgccattgcgcgcatccgggtcagcgccgagggccaggaaggcttgcgcgcgttcctgcaaaaacgtccaccgagctggcagccccaggagccgcgttcatgagtacattgacgaccctgctggtggccaaccgtggcgagatcgcctgccgcgtgatgcgcaccgccaaggccatgggcctgaccaccgtggcggtgcacagcgccatcgaccgcgatgcacgccacagccgtgaggcagatattcgcgtcgacctcggtggcagcaaagccaccgacagttacctgcaaatcgacaagctgatcgctgccgcccaggccagcggcgcccaggcgatccatccggggtatggttttttgtcggagaacgccgggtttgcccgtgcgattgaagccgccgggttgatcttcctcgggccgcccgcctccgccatcgatgccatgggcagcaaatcggccgccaagacgctgatggaaaccgcaggcgtgcccctggtgccgggctatcacggcgacgcccaggacctggacaccttccgcgccgcctgcgaacgcatcggctaccccgtgctgctcaaggccaccgccggtggcggcggcaagggcatgaaggtggtcgaggacgtcagccagttggccgagtcgctcgcttcggcccagcgagaagcgctgtcgtctttcggcaatgggcagatgctggtggagaaatacttgctcaaaccacgtcatgtggagatccaggtgtttgccgatcagcatggacactgcctgtacctcaacgaacgagattgttcgatccagcgtcgccaccagaaggtcgtcgaggaagcaccggcgccggggttgagtgttgaacaacgcaaggccatgggcgaggcggccgtgcgtgcggcccaggccatcggttatgtcggcgcgggcaccgtggagttcttgctggacgcacgcggtgagttcttcttcatggagatgaacacgcgactgcaggtggagcaccccgtcaccgaagcgattaccggcctagatctggtggcctggcagattcgtgtcgtccagggcgaggcgctgccgatcacccaggaacaggtgccgctggtcggccatgcgatcgaagtgcggctgtacgctgaggacccggccaatgacttcctgcccgccaccgggcacctggcgctgtaccgtgaatccgcacctgggccagggcgccgtgtggacagcggtgtcgagcaaggcgacgacgtctcgccgttctatgaccccatgctcggaaagctgattgcctggggcgaggaccgtgaacaggcgcggctgcggctgctgggcatgctggatgagtttgccattggcgggctcaagaccaacctgggctttctgcgacgcattatcgggcatccggcgtttgcggcagccgagttggataccgggtttattccgcgttatcaggatgagttgctgccggtcccaggagagctaagtgataagttttggcaggcggctggcgcggcctttattcagagcctgccgccgggtgagggaccgtgggcggataggcacggttttcgcgccgggctgcctgccgaggtgtcgctgcatttgagctgcgatggccaggaccgactggtgacgctggccccccaggcgccacagtggcgtggcgaacagttgctgatcgaacaacagggcgtgcgtcgcagccatctggcggtacgccatgaccacacggtgtatctgcgttgggacggcgagatgcatggggtaacactgttcgatccgattgccgcagtcgaggccaaccagtcccatcagggtgggctgacagcgccgatgaacggcagcatcgtacgggtgctggtggaggtgggccaaccggtggaagccggcgcgcaactggtggtgctggaagccatgaaaatggaacacagcatccgtgcgccccaggccggggtggtcaaggcactgttctgccaggaaggcgaaatggttgccgaaggttgcgcattggtggagctcgaaacggcgggttaaaactttgccgtggcctgtacgacgacgcccagcagccggcaatcgtcggtcagcaactgtttcgggtaggtgggattgagcggcaccaggtaacgctggccgctctcttccagcaactggcgaaaggtcgcctgggggctcccaacccactgggccaccaccaatttaccgggctcggcggcaatggccgggtccaccaggatcatcatgcccgcactgatactcaggccactgggtgcggtcatggcgtcgccggtgaccggcagccagaaggcttcgccccgggcgtggtaatccgtcagctcgaagcgggcggcgccgtaaggtgttcgcggctcacgcaattcgcacagccctttccagtcgctgaccggatagcggaaatacgggttgtagtttttctccgcaggcggctcatcgacccgctcgcgaatatccagcgcgacttccaggtagcccagccccagcgccgccagcacccgattcatgtccaccaggctcggcgcacggcgcttgttgagccaatggccgacaccgccctgggacatgcccaggcgctcagccagttcaccctgcgtgaccttgcggtcttccatgttggccctgaccaacgcgatccagttatccatgggcgcagacaatacgtcacgcagtttccagggcaataaacagtttgtagtaatccataaaacgacataaatacgatacgtactatcatcggcataaggttttcgacacccaccccagagtaccgccccttatgacgacaagcccgtatctgctgcctgaaatccccgaagacaccgagctgcacgacctgcgcagcagcggtgctgccaagcgcgcattggacttttacttgaaagaagatatgtcggcatcagccccggacgaggccctgtttgccatcaagccaggcatcagcccggaggaagccctggtgcacgcctcggacctgttgcgcagcgccgcggccacggcctatgagtcagcgagcagccatcagggcagtcatcgcgacttggcgttttcggtggtgtatttgatcgatatggcgaaggcgatggtggagcgatcgttgcaggtgccggaggctcaagcgaacggatgacaggcgcgaagaaaaaatatttctatctcacggataaaaacatttgacttgcaaatgataatgattattattgaacccagctgatcgcgagatcagtcgatagaccaagggaccttaggtcggactcttggaatatctcctcatcaggctaatcacggtttttgacccggctctttggccgggtcttttttttgccagtttccctggcatggcttcaggctaatgaagactgtgtgttgcttgatggcgcgcatggtagcaaaagactatcgccaaaagaaagccagtcgaccgctccagcccacatctttgcgaaatagcgcttgagaatcaatctcatagaccctaagctgctgcggcgtcaaggaagacgcccccctcccccttcgcaacaattttgcgtccagtctttaccagactcctgtgtaagatagccgccacaacactcatattcaggcaaccagactatgaccgtggccttgacctccatcaggatcagcaccgacttcgacagtggcaatatccaggtactggatgcccacgacgcctatcagttactgctggcaatcaaacccgacacacgcagccaacattaccaatggttccacttcaaggccgaaggcatgcacgtgggccatacccacacctttcgcctgagcaacgcgggtaaatcgtcctacccacacgcgtggagtggctacaacgccgtggcctcctatgaccacatcaattggttccgggtgccttcgcgcttcgatggggaaatcctgcatatcagtttggaaacccgcgagaagcacgcctggttcgcctatttcgaaccctacagccgcgaacgccacgactggctgatcgaacaggccttgagccgcgccgacacccaattgctggccaccggtaaaagtgccgaaggccgtgacatccaactgctgcgtcgcggcaaaggcggcgaaggtcgtcgcaagatctggatcatcgcccaacagcatcccggcgagcacatggccgaatggttcatggaaggcatcatcgaacgcctgcaacaggacggtgacgccgagctgaaaaaactgctgaaagtcgccgacctgtacctggtgcccaatatgaacccggacggcgccttccacggtcacctgcgcaccaatgccatgggccaggacctcaaccgcgcctggcagagcgccagccaggagatcagcccggaagtgttgttcgtccagcaacaaatggaaaagtacggcgtcgacctgtttctcgatatccacggcgacgaggaaatcccctacgttttcaccgccggctgcgaaggcaacccaggctacaccccgcgcatcgaggcattggaaaaacacttccgcagccacttgagcgccctgacccgcgacttccagaccacccacggctacacccgcgacctgccgggcgaagccaacatgaccctggcgtgcaacgcggtcggccagaaatacgactgcctgtcgctgaccctggaaatgcccttcaaggacaacgacgacgcgcccaacccgaagaccggctggtcaggcgagcgctccaagcagttgggcaaggacgtgttgagcacggtagccgatatcgtcaccgtgctgcgctgacgccctctcccaccggcatcactcttgggtgccggtcatgctctgcaacacaccgtcgcggcggatcagcccatggaacaatgccgccgccaggtgcaacagcaccgtcaggaacagcaggtaggcgagataaccatgggccttgcgcagcaccgcgaacaacggcgcatccgcgcccaccagcgccggcagttgtaccgaactgctgagcatcaccgggtcgcccgccgccgaaatcatcgcccagcccagcagcggcaataccagcatcaaggcatacagcaacacatgggatgccttggccgccaacacttgccacagcggcaagtcggtgggcaatgggggctgacgggtggcgaaacgcaccatcaggcgcacgatcaccagcgccagaattgcaatgcccagcggcttgtgcaggtggatcaaccactcatgccgctccgagacagacgccgccaggcccgcaccgataaacagcatggcgatgatcatcagcgccatcagccagtgcagcaaacgcgccagcggggcaaaaaaccgtggttgggcattcatggcttcgactcctgaggggcgctgtgcaacgggccgacttcaccggcgcggcgcaggtaggaactggcatacgccgccgagcgtgccgccagcaacgggtcattggacgcttggatgccactgggcagaatcagcgggtcgaagttgatgtcgcggcaatcaccgtccgcttgcggctggctgctttgcagcaccagggtgccggcattgatgactttatgctcgccagtccaggccttgctcgcctcgtccagtgggtcacccgggttggccagggtcatattcaactgccagcgcaacggcccggtagccaggcgctggaccaggtctttttccaggtaatcactccccgccggggcgacgtcgcccgccgcgtcctgactctgcggtaccacaccccagcgcacggcctggcgcttgccatcggcccctaccaggtaaaacgcgttgataccgttgtaggtttcagtcgcataactggccgaaggcttggcagtcttgacccacgccaggaacggcgcggtctcggggtgggcggcgaaaaacgccggcatgctcgccgggttcggcttgccggtggcgggctccggtgcaccggccttgagcatctggtagaacgcctcgggcgtgcccaccgggaacaccggcatgctgttcatgccggtgcgccattgctggccgttggcctgtgtgaactgcagggcaaaactgcggatcggcacactgctgtcgggcgcgtaagggttaccgctgggcaaggcaaaccggccgatcactggggtcttggcctcgctgaacacttgggcactggaataggtgcgggcttcgggcgtgctctcgaaatacccggcgacgcagatgcctttggcatggttacgccgaaagcccgggtgcacgccattgttggtttccagcgcgttgaccagggttttaggacgcaggcgctgtgggtcgagggtgccgttgacgtaggcaaaggcccccgccacaaccgcaaccacggcaccgatacccgccaggcgcgcgatcaggctcgcgatgctcaacggaggacggggcggtgatgagtgatctaccatgaaggaactccaggccaaaggccttaggggtgaacataaggtcggagcattaagacgaacgccgatcggctctattccctggccctggatttattttcaagcacggggaataaccctcaacggcgcacgtctctctcatcccagcgtagtgaccagccagattcccatgcatgaactcgacgaacagttacgcgaactcatccccaggctgcggcgctttgccgtgtccctgacccgtaacgccagcagcgccgacgacctggtgcagtcgaccctggagcgggcgatcatcagttgggccgataaacgtgtcgaaggcgacttgcgcgcctggttgttctcgatcctctaccggcaattcctcgatgctcaccgccgcacccggcgttatgcgcgcatgctggaattctttaccgggcgtgacgatgtgcagccgtcggtcgaacgcacggtgatcgcccagtcgaccctgcaagccttcgatcagctcaacaccgagcagcgcgccctgctgctgtgggtttcggtcgaaggcttgagctacaaggaagtcgccgagatcctcgatgtgcccctcggcacagtgatgtcacgcctgtcccgggcgcgccaagccctgcgtcaactcagtgatggcgaaattgccagcccttccctgcggatactcaaatgatcagcctgccccccagcgaacgcgatttgcatgcctacgtcgatcaccaactgctggagagtgatcgccgtgtccttgaaacctatctggcggcccacccggatgtcgcagcccaggtccatgcctggcagcacgacgcgcagttgctgcgtgccgcgttgggcggtgccctgcagcaaccggccaacccggacctggacccggcgctgatccgccagcgcatcaagcgtcaatcacgccgccacttcgccacggcagccgtgctgctgatcgctgtcagcctcggcggtgtcggcggctggcacgcccgtgaagtcagccagccggcccaactgcccatggccgatgcgatgcaggcgttccgcttgtttgcccaggacggcatcatgccggccgactacaagggccagggcggcggtacgatgcaggcctggctcgaccgctatttcaaccaggcccaccgcctgcctgacctgagcgcgtcgggcttcacgccggtcagcgggcgcctgctcaccaccgagcaaggcgccgccgccatggtgctgtacgaagacccgcaagggcggcgcatcagcttctacatccgcccgccaggcccggaaaacggcttcctgccgcgtggcagccgcagtgccgatggcttgcaggcccagtactggtccggtgccggctacaactatgcggtggtcagcccggcggatcagcccaccccggcgatgttgaagttctagaaacccacgtcgagtaccacgttgtcgaggtaggtgccggcgggcggtgtggtttgatcggtgtagatcctggcgttgtagttgaacacctggctgccgctacccaggccattgccggggttgacctcggcgctggaactgtcgcgccgcgccgtgcccacgctgccccagcgcgtggtgccggcgcttttgaagatgtcgtaggccaggtagttgctgcctgagatcatgcgccgccgcccgcccacactgacagcgttctggccgtcgctcaggcccacgctgtaggcactgcccttggtgcaggaaatactgatggtctggccagtgacagcggtgaacccgctgataacgggcgcactgccaaaactgatattgggcgcggtgatctggcagtcattggtgacggtcatgctcacggtcaggagcttgacttggggagtcaggttcttgtcacgcaatacgcacaagttacccacccccaggccaatgcaataatcccaggtccatgcaacgctgaggacttcggtatacaccccggccgccacattcgtcccggtaatactgcccacgtaaagcggcaggttcttgctgcccggccccgtcaaaagccccgcgcttgtcgcaatgccattggggccgaaatcgaactggagcccgcgtgtaatagggaacgtggtggtgttattgccatacagcgtataaccgatcacatcccccgtggggccgaccatgccgctggtggtcgaggtgatcgtggcatagaagtggtcactggtgccgagggcaatcagtgaagcggtgcagctcaacccgccgttgagggtcgaactgttttgcgtcgtggtgcgtacgttgatcgaactcaccgagccaaaactcaccggggccgtcgccaccgtcgaacacagcgccattgcctgccccgagcacaccatcccgaggagcgacagccagcccacgcgtctcactggcacaccaacggcccgatcagcggcacgccttgttgctgctcgtcgacctcgaatcgcgcctggcacgtacgcccttcacccagcgtgacctgcaaggtgttatgcgccgagaggttctccaggtacaccaggccgtcccagccaaccaccgcctgctggttgctttgctcgtgcaccaccaggctgcccaagggcaattcctgatgctgggtgtccaccagggtaacgctcgccgcgagtacccggcgcaatggaaactccagcaggtagccactgccacggcgcaccgacacacgttgttccacattcgggctctgcacattgagcggcaggttcagcggatcgatttcgtacttggcgcggtagtacgcgctgctccacggcaccaggagatgcccattacggtcggtttcgcccaccagctggttctcgtagcgcaccgggatacccgcgaaaccctgggtactcaccaccacaaaggcatcattgatacggttggcggcaaaggtgtcgccacccatccacaccagcgaaccgctggcatccgcccagcgtgtctcggcatcgctgctgccgtacacgccggcctggagctgcaccgactgcaagcgccaggtcaggtcggcctgccgatacgccgcgccatcaccctgggcataaccgaggttgtagcccaccccgccctcgctgggcaccgcgctgctgtaattgaggcgctggcgactggcgccgtccttgctgcgctcggtgctcaaggccaggctgccgttgaggtcgaacggaatcaccagttgcgcctgcatcgcccagttgctgtcgccgatctcgcggttggccgacaggtagaaactggtgttgcgccacagcggtttgctccagctcaggttgagcagccgcgtgcgcgaatcgtccgccgcctgcacatcgaaataccccatgcccaggctgccaaaacgctcaaggttgaggctcagcgtcacctgctcgctgcgtttgctgaggctcgcgtaagcggtgtcgaccagggtcaggtcggcgtactcgtcgtgcctttccacccgctgataggacaggctgtagcgcgtgctgttgtactgataccccaggctcagttgctggccgctgcgcccttcaaatcggctttggctgacggcggcattgagcacgccgaggttgcccagccgcaggttgccacccaggccgcccagggtcaggtcagtggaggcttcggcatggctctccagggtcaaattgtcggaataaccatagcgaaaggtaccgctcgccacgccggggccgtaggcgaagtccttcagggtgtactcccggcgcaaggtgccggcggccaccgaaaaatccgtcaggcctttttccaacagggtgctggtcacatagaacggcaccgtggtcgacacctggcgacccagggcgtcagtcgtcaccaccaccgcttcgcccgctccgttgataaacggcacgttggtcagggtgtacggccccggttgcaacagcgcgctgtcggatttgtagccattgataaacaggtccaccgacgacggcaccgcggcctcaccggcaaattgcggcagggggtaagtcaccaggtccggacgcaccgcgaagtcccgcgagaactgcacaccgccaaggcgcaccgaactgctccagggcaaggcgccgctgatcacatcaccggcttcgtaggtcagcagccgctcatcatcggagaagcgccaggtagtgtcatagcgccggtagccgttgttgaacgtaccgctgctgacgccatcggccaaggtctggcggtactggccggtgttggacaaggtgccccagttgtcgaacaaccgcacttcgttccaagcggcgaggtagctgccgccttcgtctgtgtcgttgaaatacaggtcatagttgagcaaggcgccaaagctgctcattgcctggctgcgcgggtaggtgttgcggttgccgataaattgttcctgcagccacgacggcggcacatccagcagcaggcgctggccgttgctgtcgtaatcgctgtgcaggccggggatcttgtccagcgccacgctgccgctcaattcaccgggcagcttcatgcccacgtcctgcagcgcgctggccggcacatagagttgcccggcccgttgatcgaccgcgataacgcggccggtgtccatctgattgaccaccagctccagatacaactgtgcatcggcgacagcctccatactgctcgggggcggtggcaggtcgccagccacgctcggaagcgcaaccattgcgccgcccagcccgcccaccaccgacagccatagactgcgagccagaccacgactcaccatggcgttgtgtccttcaatggacatctccatccgtttaaatcccggggcgctcctgccccgttaccggcttgttaccgctgcggcgcgaggctctccaactgcggtgcgccgttgatcctgacctgcagcggctggtcggccgacagcgctggcggcaccggccaacgcatgctggcgcccggcagcacgtagcccaacaggccatccaccaagggccggctctgcccaccctgcttgaatgacgcatcggtaaggcgcgcatgcacagcgccctggttgcgcacttcgatatagtcacgccctgctaccgtgaccttgtgccagctcagatccggcttgcccgcgcccttggggtcacgcgggcgcgtgctgtcctccttgttccacaggcccgcaccgtaggcgaacagcggcaccgaataacgcatctgaaagcggatcgccgctgcggtgttcttgccttccggcggcgtgggcacctgcagggctgaagggatttcatcgatgatgatgcggtaggccaactcttgccccggtggtacttcacgggtgcgggtcaagcgcaccaattgtttctgccctggctcgatccgcgcgacgggcgggctgccgatcacatcacgctggttctggtattgctcttcgaaaccactctggctccaggcaaacacgcgaatctgcaggctcgcggtttcggtcccacgattttccagccacagcgcgctcgcctgttgatcggcctccagcaccgggtcgatgggccagatcagcaccgagctggccgcctgcacaagccccgccgtgcacaccgcactcaaggcaatacccgcggcccacaaccgccgggatggtgaacgcataaccccactccttataccgatagccttaccacgtcagctgcacctgcagcgtgtcgctgtatgtccccccaggctgattgcccggcaattgcacccgcccgtagatcggcaggctgatgttgttcgcatcgctgtaggccacgttgacgctctggccgatccccaggctctgactgaacgccgcatccctgaacaactggtaagccacccgcgcgctaccgctattgagctgcagattgcgcccggtgctgctgtgctgcccgccgtcgacgctcatgctcagcgtcacccccggcgtgcactgcaaggtcacgccccccgtcagcgccgccgtgaccgtgctggtggccagggccgaataactgccataggtcagcgcaccataattggaactgccgcccacgatcaggcagcccgggatgatggtcgcgctcacctggaaactctggctggtcaccgccgacaacggcaacggcaccgcgagcccacaggccagcaacgctttgagccacattgctagaacgtcagttccacggccacggtgtcggtgtaggtgcctgccggcagccccgctttgcccaccgcccgaccatagaggttgacggtctgtgccaccccggtgctggtggcgagggtgatcacaccgtcaatcgccagcagcgcggaatggccgctgtcggtgtagaaatcgtagggcacgaagttgcccgcaccgtcggccaatgcacggctgccaccgggggacgcgccgtcatgtgcaccggcgcgcaccttgaccgctggcgtagtgccactggaacacaggatcgacaacgcgccaccggtgccagtaccgcccagcaactgggcatcggcgttggtgaacaggctgttggtggtgccgaaattcaagctaccgaagttcaacccggtagccgcgcccgaaccgttgacctggcaactggcgatcaatatcaggctggaggtgatctgcccggtcaccgtagttgcggcattgaggctggaggccattgccaggcccagcgcacacacacccaatcgcgaaacaagtacatgcatggttttcatcctcttgagttaccagtccagtgtcaccgtcaacgtgtcggtgtagatccctgccggtaaggcactggtatttgccaccacggagccaaacaccgggatcggtatctgggtgcccttggccacgacaaaattgcgttgttgcccgatgctataggtgctgtgcccctgcgggtcggcggacagtcgataaggaatcatctggcgcccattgctcaggcgccgagtggtgccatcaccgttggtgccgccgtcgatggtcacggtgaagctcgagaccgaggggttgcacgacaccgccaagggcgccttgtcgcccgcggtgacgccagcacccaatggattgttccaggtcggaccctgactgccgaagtcgagcatcgccgtgccgcccgtggggttgaccggcgcgctctccacgcttttgctcacttcgcaactggcggtgatcaccagccgcgcctggataaacccgctggcgacagccgcctgcacgtcatctgccagcaccagcaggccacccatggccaccagggccaggcaacggcttaccatgtcaccgtcaccttgagcaggtcggtgtagcggccgacggcggggatctccttgagcggctcgatgcgaccatagagcggcaggtcgacgaaacctgcgtccggcacccggccgctgagcggcacatccacgggcaacggcacgcgccgcgccgcgtcggcatagatgcgatagggaatgggttgggtcgatgtagtagcactgaggtagcgcacttcaccggtgccaccatgcaggccgccatcgacgcggacctggtacggcgtgtcggggttgcactccaggcgcggttggcgctggctgatcagcgccgcactcaggggcccggccgggtcatccagacgcgggccgctgccgaaatccagtacgcccaattgctcgataccagcgctgcgggtggtgcccaccaactggcaaccgcgctgcacgtcgatacgcacctccacctggagctgtgcaccgtaaaccgtgttgcagagcatcgcgcccatgattgccaatactgctcgtcccttcactgccccaaatccttgtacaggggtgactgctgtgtaggaggttagtcactcagcgagaaactgccagtctggacaggattaccttcacgagatgctttttcgagatagctggcagcgtccttctctattggtcaaaacgcgacgagcgccctaaagtgagcgaccaccgaaatacagagtgacttgcattggccgcgctttccctgatccgtcgcctgctcggccaaaagcccgggccccttgacgcttcgcccattcccgcgttttttcagcaaaaggccgcgcaacagggttacaccctgagcaccggtcaaacccgcgccattgctgccctggcccgggaaacccaacaactgctcgctggccagcccgcccgcagcctgtacctccacggccccgtgggtcgcggcaaaagctggctgctggacgggttcttccaggcgttaccgatcgccgagaagcagcgcgtgcacttccatgattttttcgcccaactgcatcgcggcatgttcacgcaccatgcgcaggacgatgccctggccgcgacgctcgatgagcagttggcaggctgccgggtgctgtgtttcgacgaattccacgtccatgatatcggcgatgccatgctgatcacgcggctgttcaaggccctgttcgagcgcggtgtactggtgttggtgacgtccaactatgcgccgcaagggttgctgcccagccccctgtaccacgagcgcttcaagccggtgatcgacctgatcgccgcgcgcatggaggtgctggaagtcagttcgccccaggactttcgcagcctgccccaggcccaaagcacacaacgttttacctgcggtcaatacgtgtggccgggcaccccggggcagcgggcggcactcgacctgcccgccgcagacgcccctccccgccccctgggcgtcggccatcggaccttgatgtgccgccaccatcaagggcgcagcattgccttcaccttcaacgacctgtgcgaacaactgacggcggtgatggactacctgctgctgtgccaggactacgaccactggatcatcgacggcctgcctcaactggcgaactgcccgattgccgtgcagcagcgctttatcaacctggtggatgtgctttacgaccgcgacaagcacctggtactgatcggcgaattaccgctcgaggttgccttgagcggccaggccatcgacctggcccgcaccgccagccgtcttggacaattgcagcaggcctccccgcaacacacccccgacccggtatcatgagcgcctttcacgccttcttgccgagtgaccgcgccgttcatgaataccctcgcccaactcaaggccggccaattggccggcatcacgcgcctggacctgtcctgcgggctgaccgaattcccccgggaaatcttcgagctggccgactccctggaaatcctcaacctcagcggcaatgccctgcgcagcctgcccgaggacctgcaccgcctgccgcacctgcgtgtgctgttctgttcggacaacctgttcaccgaactgccggcgtgcctcggccaatgcgccaaactgagcatgatcggcttcaaggccaaccagatcagccacgtgcccgccgccgcgttgccgccgctgctgcgctggctgatcctgaccgataaccgcatcagcgcactgcccgaggcattgggtgaacggcccttgctgcaaaaactgatgctggccggcaaccacctggcgcacctgccgcaaagcctggccgactgccacaacctcgaactgctgcgcatcgcttccaatcgcttcacgcgcctgccgcagtggctattgacgctaccgagcctgacctggctggcttacgccggtaacccggtggaaatggcggtgaccgtggcgggtgaagacgccacgccggacattccctggtccgaactggaactggccgaagtactgggcgaaggcgcgtccggcgtgatccgcaaagcacagtggacaccctccaatacgcccgtcgccgtcaagctctataagggcagcatcaccagtgacggctcaccgctgcacgaaatgcaggcgtgtatcgccgccgggttgcaccccaacctgatcaaggtcgaaggccgcgtgatcggccatcccgatgaccaggccgccctggtgatggacctgatcgagccgagttaccgcaacctcgcggccctgccgagcctggcgtcgtgcacgcgggatatctacgcaccggacacccatttcagccttgaagtggcgttgcgcatggcccgtggtatcgcctcggtagcggcgcacctgcaccgccacggcatcacccatggcgacctgtatggccacaatattctgtggaatgaagcaggtgactgcctgctcggggattttggcgccgcatcgttccatgccacggcggacaccgaggaaaccagggcgttgcagcgtattgaagtgcgtgcgttcgggattttgctgggggaattgctggagcgggttgaggaacaggtgagcggtgaatggctgacgctacaagcaaggtgctgtcagcccgatgtgctggcacggcctggattcgaagagatcgaagccatcctggcctctatccaactgcgctgacccgatatgtgagggggcaagccccctcccacatgttgaaggttcagccagccaggccgacgaacatatcctgcacgtcatcatggttgtccaggccttcgaggaaggcttcgacttccgccatctgctcatcgctcaaaccgctcaccgggttcttcgagaggtagccgagcttggccgacagcacggtgaaaccctgctccggcaaggctttctgcacggcgtcgaggtcggtggtctcggtgatgaacagggtggtgccctcttcttcgccgtcttcgaaatcctgggcgccggcttcaatggcggccatttccggatcggcgtccgggctgtccggcgaggcttcgatcaggccgacgtggttgaagtcccaggccacggaaccggaagcgcccagctggcccttgcggaacgccacgcggatttccgccacggtgcggttgatgttgtcggttacgcattcgacgatcagcggcacctggtgcggggcgaacccttcgtaggtcacgcgatggtattgcacggtttcgccgagcagaccggcgcctttcttgatggcgcggtccagggtttccttgggcatcgaggcctttttggcctgttccaccaccagacgcaggtgcgcgttggtcgcggtgtcggcgccattgcgggcggcgatggtgatttctttcaccagcttgccgaagatcttgcccttggcattggctgccgcttctttatgtttgactttccactgtgcgcccatgactcactctctttatgtccatcgcgccgaaacgtctactggccggcgctttgggggcagagtttatagcgcaaaaacgcatcgttccaccaaaaaaccgtcagggcgccaactcgaaaaacacctggatcaggcgcaatgcgcggcgccgttccatgcagccgagcaagtgacggttcaccaggccatcaccctggatcggcacggcgcacacccgcgggtcggggctgacctccatcgacgacaccaccccaacgcccaattcggcagccacggcttccgtcaccgcctcgcgactgtccaactccagcagcaccctgggctgtacaccggcagcgagacaagcaccgtcaaacgtgcgccgggtgatggagccgggttcacgcaacaccatgatcacctcatgcagttgctccaactgaacaccctcggcctgcctggcccacggatgcgccaccggcaccagcgcgcagatccgcgattcggccaaaggctgcaggtgcaggccattgcgcggctcgacctcggtcagcaccgccacgtccgcatgctcggacaacagcgccgccagggtttcctgggcgttgcccaggcgcaggttcacggtgatgcccgggtagcgcgcacgcaggctggcaatcatcggcatcaccaagtgcggaccgtccgccgccacttccaggcgcccggtgagcaattggcgattggcttccagcaggctctgcgcctcgtccaccagaccgaagatcgcccgagtaatggccgccaggcgcgtgccttcctcggtcagttccacgcgcctggcagtgcgacgcaacagcgcgatctggtagtgctcctccagggccttgatatgcccggtcaccgccggctggctgatgaacagccgcgccgccgcacgggtaaaactgccctcgcgggccacggcatcgaatgcacgcagttggaacaggttcatagctatcggcctcactgatagctcgcataacaacaaacaatttgattgatgacaagccaaactgcaatttagacgccgtagattcaaccgatgcttcgcgaggatttgtaatgacgacgcccatcctgctgacccccggccccttgaccacatcgaaccgcacccgccaggccatgctggtggattggggttcatgggacgagcgcttcaaccagctcaccgccagcgtctgcgaacagttgctggcaatcatcgacggcgccgccagccaccattgcgtgcctttgcaaggcagcggcaccttcgccgtcgaagcggccatcggcaccctggtcccgcgcaacggcaaggtactggtgctgatcaacggcgcctacggcaagcgcctggcgaaaatctgcgaagtactgggccgcgatttcagcaccttcgaaaccgccgaggaccaacccaccaccgccgccgatgtgggccgcctgctgcacgccgacaaggccattacccatgtcgcgctgatccactgcgaaaccagcaccggtatcctcaaccccttggccgagatcgcccaggtggtgaaacaccacggcaagcgcctgatcgtcgatgccatgagttccttcggcgcgttgcccatcgatgcccgcacggtgccattcgacgccctgatcgccgcctccggcaagtgcctggaaggcgtgccgggcatgggctttgtcttcgtcgaccaacaggcgctggccgccgcccaaggcaactgccactccctggcgatggacctgttcgaccagcacagctacatggccaagaccggccaatggcgcttcaccccaccgacccacgtggtggcggccctgcatgaagcgctgctgcaatacgccgaagaaggcggcctgcgcgcacgtcatcaacgctacgccaataactgccaggcactgctggacggcatggccgaacggggcctgcgcagcttcctgccggcggacatccaggcgccgatcatcatcaccttccacgccccgcaggacccgcgctaccacttcaaggacttctatgaacgggtcaaggccaagggtttcattctgtatccgggcaaactgacccaggtggaaaccttccgcgtgggctgcatcggccatgtcgatgccagcgacatgcacgccgccgtcagcgccatcgctgacgtactgcaggccatgggtattaccctttcatcgattggagcacacgcatgaactatcaaaaccccaacaccctgcaagccgtgatcctcgattgggccggcaccgtggtcgacttcggctccttcgcacccacgcagatttttgtcgaagccttcgccgaattcgacgtgcaagtctccatcgaagaagcccgtggcccgatgggcatgggcaagtgggaccacatccgcaccctgtgcgaccagccgcaagtcgccgagcgctaccgcaacgccttcggccgcacgcccaccgacgatgacgtgacggccatctaccagcgcttcatgccgttgcagatcgagaaaatcgccgaacactcggcgctgattcccggcgccctcgacaccctcgcccgtttgcgggtgcaaggcatcaagatcggttcgtgctccggctaccccaagcaagtgatggacaaggtggtcgcactggccgccaccaacggctatatcgccgaccacgtagttgccaccgacgaagtgcccaacggtcgcccatggccagcccaggccctggccaacgtgattgcgctgggcatcgacgatgtggcggcgtgcgtgaaggtcgacgacaccgtgccgggcatcctcgaaggccgccgcgccgggatgtggaccgtcgccctgacttgctccggtaatgccctgggcctgacctacgaacagttccgtgcactggacgctgccacactggccagcgagcgcaagcgcatcgaggcgatgttcgcaggctcacggccacactacctgatcgacaccatcaacgacctgcctgcggtcatcaccgacatcaatgcgcgcctggcccgtgggcaaatgccgcagagctactgatagaggtcaacatcacggcacttaccccaggcaaaccgctcaaaaccggcatacagtagaaggactccatcgccaaagaatggagatttgccctgatgagtgaggaacccagcgatgccgtggaaaaactccgatacacgctacagcaccatgtcgattgcgttgcactggttgatggtggtgctgctggcggtggtctacgcctgcattgagttacgcggccagtttcccaaaggcagcggtgcgcgaacgttgatcgtcgagatgcacttcatgttcggccttaccgtgtttgtgctggtgtggttgcgcctgttcgcacgcagcctgggagtggcgccgaagatcgtaccggcgccgccgccatggcagagcctgttggcgacgctgatgcacgttgcgctgtacgcgttgatgatcggcatgccgattgcgggttggctgattgtcagcgccgaggggcattcggtgatgttctatggcatggaattgccgccgctgatcgcggaaaacaaggcgctggccaagcagattgaaggctggcatgtgctgttcggcaagatcggctactggttgatcgggctgcatgcgctggccgggatcgcccaccattacatcctgcgggacaacacggcgttgcggatgatgccgggcaagcgcgctaacccttgaagcctcgctggccttgcagcccgccggtgtggacgaagaccaggcgagtgccgggggcgaagcgcccggcttcgatccgggtcttcaaggccagtaacgccttgccggtgtaaagcggctccaagggtacgccgcaggcctgctgggtggtgtcgatgaagtcgagcaactcggggtcgactttggcgaagccacctcgactggcgtccagcagttcatagcctccctgcacgatggcctcgacgttctgcgccacaccgtgatcgtccggcaccgccatggcgccgtacaccgggtgcgcgcccgcctctgccagtgccaggccggccagggtggtgccggtgcctgccgccagccaccaggcgtcgtaatccgtccagcccacgctgtgcaactgtgcacgcacctgctcgaccagcaccgcgcaacccagggcgcccgcacgaccgccgccgccttcgggcacggggtgcaggttgggatactgctcacgccacggcaaccagaaacccgactcatgccgcgcgcgataaccgccatagcccagccaatgcagctgcatgccgaaggctttcaggtcgaggacggtgggggtgtcttgcggatgcccgcgcagcaggccgacggtagggaaaccgaagcgcttgccagccgcggccagggcatgcagatggttggaataagccccgcccaggctgatgaggccgcgagcggcttgcgcctgcgccaggtgcccggtgagcttgaaccacttgttgccgctgatcagcgggtcgatgcggtccaggcgcaacacggccagctcgacacctctgagccaatccaggtgcagcggttcaagcggtgcgtggggaagccaatcgaagggacccatcgggcgggatctgcatgaaaaacggggcggtagtctaccaccgccccgcccagggtcttacagctcggcggcgaggcgcgagccctggttgatggcgcgcttggcgtccagctcggccgccacatcggcgccgccgatcaggtgcacattctggccggcggcgagcaggccgtcgtgcagttcgcgcagcgggtcctggccggcgcaaatcacgatgttgtccaccgccagcacctggggttcgccttcggcgccaatgcgaatatgcaggcctgcatcgtcgatcttcaggtactcgacactgttgagcatctgcacctgcttgttcttcaagccggtgcggtggatccagccggtggtcttgcccaggccgtcgccgaccttggaggccttgcgttgcagcaggaacacgtcacgcgccggtgcatggggttgcggcttgatcccggccacgccgccacgggcttgcagccgggtgtcgatgccccattccttccagaatgcttcgcggtccaggctggtggaaacgccctggtgcacgaggaattccgacacgtcgaaaccaataccacccgcgccgatcaccgccacacgcttgccgaccggtttgcgctccaggatcacatccaggtagctcagcaccttggcgttgtcgatgcccggaatcgctggggtacgcggtgcgataccggtggccaggatgatctcgtcgtagccacccgccgccagttgcgccacatccacgcgggtgttgaggcacagctccacatgggtggtctgcaatttgcgtttgaagtagcgcagggtttcgaagaactcttccttgcccggcacccgcttggcgatgttgaactggccgccgatctcgctggcggagtcgaacaacgtcacctggtggccacgctcggcggccaccgttgcggcggccaggccggcaggaccggcacccaccacggcaatcttcttgatctgcttgaccggcaggtagttgagctcggtttcgtagcacgcccgtgggttgaccaggcaagtggtcagcttgccgccaaaggtgtggtccaggcaggcctggttgcagccgatgcaggtgttgatttcatcggcgcggccggcggcggccttgttgacgaactccgggtcggccaggaacgggcgcgccatggagaccatgtcggcatcgccctcggcaagaatctgctcggcgatttccggggtgttgatgcggttggtggtgatcagcggaatctgcactgcaccgcgcaacttggcggtgactttgctgaacgcgccacgcggcaccttggtggcaatagtcgggatgcgcgcttcatgccagccgataccggtgttgatgatcgtcgcaccggcgccttcgatggccttggccaactgcacgatctcttcccaggtgctgccaccttccaccaggtcgagcatcgagaggcggaagatgatgatgaaattcgggcccacggcctcacgcacgcggcgcacgatttccacggccaggcgcatgcgattttcgtagctgccaccccagcggtcggtgcgatggttggtatgggcggcgaggaactggttaatgaagtagccttcggaacccatgatttccacgccgtcgtactcggcgacctgggccagcagcgagcaggtgacgaaatcctggatctgcttttcgatgccctcttcgtccagttccttgggcttgaacgggttgatcggcgcctggatcgcactcggcgcgacctgtttggggctgtaggcatatcggccggcgtggaggatctgcatgcagatcttgccacccgccgcgtgcaccgcctgggtcacgatcttgtgtttctgcgcttctgcgtcggtggtcagcttggccgcgccggcatacacaccgccctcgtcattcgggccgatgccgccggtgaccatcaggcccacaccgccccgggcgcgctcggcaaaataggcagccatgcgttcgaaaccgccgggtttctcttccaggccggtgtgcatcgagcccatcagggtacggttgcgcaaggtggtaaaacccaggtccaacggggccagcagatgcgggtaggcagcagcggtcatggtcaagctccacaacggatcatcacggggtgtgacgggctcgtgcggcccgccatcggtttatgtcccacagactaaaaggcggtggatgacggctcaatgactgaaactgacaagttattgatccaaatgcacagcgccccttggcaagcccgcccatgggccctaccctagtcggcgaaccctgcacacggtctgttgtctgttcccccatgcgtaaacttcttgcttttaccgtctccctggcgctggttgccgccatcgccgcgtatctggtctggacccaggagcgccccgtggcgcattacctgtcggaccttcggatcaccctggccgtcaacgaaggcctgcctgctgaccgcggcaacctgctgggcatccagccggagctgtttcccgccgactaccagagcctggaacgcctgcacctgaagctcgcggcctacctgcaaaaagcccgggaccaggggctgatcaacgacaagaccatcgtggtgctgcccgaacatatcggcacctggctgatgctcaccggcgaaaagaacgaggtgtaccaggcgctccatgtgaaggatgcgatgaactggctgtcggtcagcaacccgctgctgttcgcccgcgcctggatcagcgccaccggcgacaaccgcaccgacgacgcctacctgcgcatgaaagcctcgggcatggcgcgggactaccagctgttgttcggcggtctggccaaggaattcggcgttacgttggtggccggctccatcaccctgccgaacccgagcgtgagccagggtcaactgcaggtcggccatggcgccttgtataacgccagcgtggtgtttgccgccgacggcttgccgatcggcgatccgcagcgccagctctacccgatctacgatgagcgcggcttcatcaagcctggcgatgaaaacatcgtcagcgtggtcgacaccccggccgggcgcctgggtgtactggtcggcagcgacagctggtacccggacaactaccgcaagctcaacgaacaaggcgcgcaattgatcgcggtgccagcctttgtgctggggcgcgacacctgggaccgcccttggcgcggcttcaaaagcgtgtccaccccgaccgaaatcagcctcaagcccgaagaactcagtgagggcgaagcctggcgccgtcttacgctgatcagccaacagccgatcagccaggccagcgccggcatgagcgtgttcctgcgcgggcagttctgggacctgggcaccgccgggcacagctttctcagcagcaacgggcaaatcagcgccgatggcgaggcccgtggcgcgcgcttgttgaatatctggttgtgaaaccggtacggctgggggacctgtcggtgggcttcgtgcacagcctggccgatgccatccacagccacggcctggacccgcagccgctgctgctgcaatacggactcgacccggcgcgcctcgccgaagccggtgcacgcttgtcgatcccgcgctacatgcgcctgggccacgccgccatccagctcaccggcgacccaggcctgggcctgcgcatgggccagctcagccgcttgagccaggcgggactggccggtgtcaccgcggcccaggcgcccactgtgcgggaggcggcgcgcgcattaacgcgcttcgaggcgctatatggctccaactatcgcgggcagtcgagcttcgtcgaggatgccgagggcgcctggctgcgcttctactccatcagcccctacaacgcctacaaccgctttgtggtggactcgatcatcgccggctggctgcatcagttgtcgagcctggcccagcaaccggtgcaggcgcagcgcatcgacatcgagttcgaggcgccggagtacagcgaacgctacgacgcgctgggagacgttcacttcggcgccgacgccaatcaactgcgcctcgaccagcacaccctggccctgcgcaacccgcagcactgccccagtacctggaacctgttgttgcagctgtgtgagcgagagttggagcaactgacccgcacccgcagcctgcgcgagcgcattacccgtttgctcgggccgatgctcaatggcggccgggaacccgacctcgaagaagtggcggcacgcttgaagctgccgacctggacgctgcgccgcaaactggccgatgaaggcactcagtttcgcgcgattctcaacgatacccgccgcgacctggccatgacctacattcgcgatacggaactggcgttcggcgagatcgcctacttgctcggttttgcctcggcccaggcgtttcaacgggccttcaggcggtggaacaaccagaccccaggggaatttcgccgcagtcagcggcattccgcctgaagtcggtcttacagctctgtagcgtcgtctgccggttccagcgggtccaactcaatcgcgtggtactcgagcagttcttcctggtaatcgtccatgccggactccttcttgagttaacaggggttgcagataaatgacctgcatcaccagcctaaagtgccgtgatgacgaaaaaatgtcgacgtcatgacgttcctgcactcaagaatcaaacgtagcagccttgtgcggatttagcctctgcgaattactgcgcaggcgtcggcaggggcggaatcgcttctgtcggcgccggcaggtccgggttgctggtggccggcgcgggttccgcctgcggcgcaagcggcgcagcctcggcaggcggcgtgacgggctgggacaccgctggctcttccttcggcggctcggttttctctgccgccggtgcggttttaggttccggcacacccagctcggctttcggctgctcggggatatgcgcggccttcttcacttcctgaggcaggaacacgtccaccagcgcaaagtagcgctcgtagaatttcggcgccgaaacggtctcgctcgccacctttaccatggaatcatcggtggaaccgatcggcatcgataccgaccccagcacgcccacacccaggctcgcggagttgttgaccttcttcagcgcgtaacggtcctgcaaggcgttggcgaacatggtcgagtgattggtgcctttgccatcgtcggcacacaccacgttgaagctgatctgcaggtgggtctcgccggtctgctggaagctcttgttgcccaccaccagtttcggatcgctgctggtgatgatgtagccctggctcagcaaggcacgtcgcgccgcttcgcacgccgccacatcggtgaccgggtaatcgcgggaaaacgtaccggagtcgtcgaaattctcatgttcataaatggcggtcttgggtgacgagcagcccgcggcgcccgccagcaccagcgccagcccgaggctacgcaagtgaaatgatgtcgacattgaaaatcctgaggaaaacggtccgggcggtattgtgcaacagaacgaggccttggcgcgcgcattcctgtcggtaaaacgtcacagccctaccgcgtaccggccgtaggaaaaagccctgcacacatatgatcaataaacacgcgcaatttgaccgaagcatggcgacttgatggccataacatccagaaactgccccggtgttccaggcagtcatccagcaccctttgcagccgcccgtcctggacggcctgattgaccatgtagtctggcaggcaagcgatccccaacccttcgagtaccacatgcttgagcgactcgatcgtggtgctgaccaacggggtgcgcaggactggctccgaggcgccgggcgccaggcgtaacggccagggctccagcttgccggtggcgcagaacttgtggcgcaggcaggcatgcccgttcaagtcctgcggctgttgtggcgtaccgtgctggcggaaataggccggcgtgcccaccagcaccaactggtagtgtcccagatggcgcgccatcaagcgcgaatcttctggcttgccggtacgaatcaccgcatcgaacccttcttcgatcacgtccaccatgcggtcggaaaaatccacatccagctcgatttccgggtaggcgcgcatgaagtcgctgagcaccggcatcagcaagccgcgcacctgcggcacgctgatgcgcaacgtgccacggggcatggcgctggcgtccgtcagctcccgctcggccgcctcgacctcggccaggatccgccgcgaacgctccaggaacagcacgccttcactggtcaacgtgatgctgcgggtgctgcggtgaaacagccgtacgcccagacgttcttccagccgcgcaatgctcttgccgacggccgacgacgacacgcccagcacacgcccggctatggtgaagctacgcgtttctgccacctgtacgaatacagagaggctacccagactgtccatgagcgagtccctggaaattgcggactccaacgtccgataagttcggaaccttagcctgtttttccgtagaccacagccccctactctgtcgacttgcccatttgcatggatagagcgcgatgacctccctcaccgattccgccgtgactgcccgaaaagaaacactgccgctgggaggattactggccctggccagcgccggctttatcactatcctcaccgaagccatgcccgccgggctcctgccgcagatgggcgacggcctcggcgtatcgcccgcgctggtcggccaattggttacgctgtacgccctgggttcgctgctggcggccattccgctgacgctgttgacccgaggctggcgacgccgccccttgctgctggtcgcaatcggcggctttgccctggtcaacagcgtgaccgcgctctccagccactatgggctgaccctggtggcgcgtttctttgccggtgtattcgccggactgctgtgggcgctgttggcaggctatgccagccgaatggtcgcgccccacctgcaaggccgggccatcgcagtcgcgatgctgggcgcaccgctggccctgtcgctgggtgttccagccggcacctttctgggggctgcggttggctggcgcctgagttttgcaatcatgaccggcctgacgctggtgctactgatctgggcacgcctgcaactgccggatttcgccggtgaaccggcggggaaacgcttggggctgcttcaagtgttcagcttgccgggtattcgtccggtgctgtgggtgacttttacctacgtgctcgcccacaacattctctacacctacatcgcgccgctgctggtgccggcgcggattgccgccgatattgaccaggtcctgctggtgttcggccttgcagcgttgctgagcatttggctggcgggtgtattgattgatcggtggttacgcccgttgctgctgatcagttgtgcgctgttcggtctggtcgccttggcgctggcgttctggatgaacctgccggcggctatctacctcgcggtcgcgctgtggggcctggcgttcggcggcctgcctgcgttgctgcaaaccgcactggccaaatcggcaggcgaatcggcggacgccgcacaatcgatgctggtgaccgtgtggaacctgggcatcgcaggcggcggactggtgggcggtgtgttgctccaaggctggggcgtcggcgcattcacctgggcggttgtgctgctgatgctactggccctggccggcgcgttacaggcggcgccccaacaactggcccggccacccttcaaggtcgaacgttgaaatacgctgatacccgcacgcctcgtaaaaacgcaccaggtcgcccgtgccgccggcgtaacagtccacgcgcaggcgcttgaccccggcagcgcgggcacgctcatcggcgaaagccaacagctgccgacccaacccacgcgcacgtgcatcacgtgcggcgatcagcaaacgcacatagacttccggctcagacgctggcggtacgtaaggcatgggctcgcccagcacaagtgccgccagcaaccgcccctcaggcgtttcaaccacccaggcaccgggcatggcacacgcgtctgtgacttgcgctacccgccggggcaatgcggaccagggcgtggtgccccattgggcgttattacccatcccgacaaaccaggcaatcacctcgtcaaacacctgcagcacggccggggcatccgctgcgctggcatgacggatcacccagccttcttttccttgaatagacacgcgcgaaactccttggtcggcgataacgaatgaccagtctagcgcacataaaaaagcccccggtcttttcaggccgggggctttttattcaaaccgacatcagaacttcttgatgtcagccttggtttccaactgcttgcggtaggccgcgaagtcctgctggccgacacgggaggcgaggaagcggcggtattgcgccttttcttcgtccgttggcgcagcggcctcgttgacgccgttcaggcgcacgatgaccaggctaccatccgccagggttacagtggtaaaggtcggcttgtccttggccgcaggcttgggcatgcggaacacggcttgcagcacggcagggtcgatcgcttcctggctacgggtagccgcttcattgaccttccaggcctggccgtcgaccggctggttcagcggggtcttgccatcacgcaagctggcgatcagctcgtcagcgtgagtcttggcagccgcgctggcgcgctccttggccatctgcgtgcgaatcgccgctgcgacgctttccagcggcagttgcgaaggcttcaggtgctctttggcacgcagcacgatgatggtttccgggtccagctcgatggcgctgctgttggcaccctcatccagcacttccggactgaacgcagcggtgaccacggcgcggttggccgcaacaccttcgccaccttcacggccaaacggcgcggaggtgtgtacggtcagtttcaggtcggacgccggctgggccaggtcggaggcttcaaatgccgcatcttccaattgcttggtcgcttcgacataacgctgctcgacctgctgggtcttgagctctttggtcagcttgtctttcaggctggcaaacgtcggcacttgcggtgcctcaacgcccaacagtttgatcaggtgccaaccgaagctgctacgcaccggcgccgatacctggtccttgttcaacgcgtacaaggcggtttcgaagtccggatcgtagacgccagggccggcaaagcccaggtcaccgccattgctggccgaacctggatcctgggagaactccttggccagggcttcgaacttctcacccttggccaggcgtgcctggatttcttcgatcttggccttggcttgcgcatcggtcgtcttgtcgttgacttcaatcagaatgtgcgcggcacgacgctgttcagcgaggttggcgatttctttctgataggcggcctgcagctcatcatccttcaccgtaacctggtcgaagaaggaagacttcttcagctccagatagtcgatgaccacttgatcaggggtcatgaactctttggcgtgctggtcgtagtaagccttgacctcatcgtcggtgagcttcaccgccgcagggttggccttgatgttgacggtggcgaaatcgcgggtctgcttttccaggcgggcgaatgccaggacttcggcgtcggtcacgaagccgctgccagcgatgcctgcgcgaacctggccgatcagcatttcctgggtcagcatctgacggaactgcatacgggtgtagcccagctgacggatcacttggtcaaagcgttcagggctgaacttgccatcgacctggaattccggcgtctgcaggatcacctggtccagcgcagcttcagagaagccaaacttggcgtcggcagcgccttgcagcagcagcttgcgatcgatcagacccttgagggccgcgtcgcgcagcagtttttcgtccagcagcgaagcatcgaaatccttgcccagctgttgcatcagctggcggcgttgcatgtcgacggcctggctcagttcggtctgggtgatttcttcaccgttgaccttggccacgtcctgcttgttgttacccgaagcctggaaaatggcctcgataccggtgaacgccatcaacgcgacgatgatcccgataatggtcttggcaatccagccttgtgaattgtccctgatattttgcagcatgcgtcccccagaaacggttgaacttcaagaataggcaaccgtggagcgtgggtagagtacggatataagaaaggcgcatccaaggatgcgccttctcgcaactggcggagcggacgggggttttcgttctccccccggcttggcgacccgatgcatacctgggtctgctggccgctccgctgccaggtcgaacctgcgttcgacccgggtaggtaaaggcttgatcgaagcttagttaacggcttctttcagggctttaccggctttgaaacctggtttcttggcagcagcgatttgcagtgctttgccagtctgtgggttacggccagtgcgagctgggcggtcagtcacagagaaagtaccgaagcctaccagtactacggagtcgccggccttcagagcgccagtgacggattcgattactgcatccagcgcacggccagcagcagctttcgggatatcagcggatgcagcgatagcatcaatcagttccgacttgttcactctaagtccccttatatatctattgagtatgattctaagttttttggtgaaagcaaaaaccagtgctgaatggcctacagacacttaagagccgctttataacaagggctctaaaaagctgtcaaggaagcccccaggctttaacacattaatgcgtgctaattctttccttggaatcagactcacgtttttcgtccttagcaactatctccggagccacatccggcaagggctccggcgcgtattgcagcgcaatttgcaggacctcgtcaatccatttaaccggtttaatctgaagatcctgcttgatattgtccggaatttccttcaagtcgcgaacattctcttcaggaatgatcacggtcttgataccaccccggtgtgcagcaagcaatttctctttcagaccaccgatagccaacacctgaccacgcagtgtgatttcgccggtcatggcgacatcggcgcgtaccggaatgccggtcaatgccgagaccagggccgtgcacatgcctacgccggcgctagggccgtctttgggggtcgccccttccggcatatggatgtgcgtgtcgtgcttctcgtggaagtccagggggatccccaggcttctggcgcggctgcgcaccacggtctgcgcggcagtgatcgactcgaccatcacgtcaccgagggaaccggtcttgatcaattggcctttgcccgggatcacggcggcttcgatggtcagcaactcgccgcccacctgggtccacgccaggccagtcacctggccgacctgatcctgctgctcggccaggccgtagcggaatttgcgcacgcccaggaagtgttccagcgaatcggccgtgaccttcaccgagaagcgtttttccagtgcatgttccttcaccgccttgcggcagatcttcgcaatctggcgctccaggcctcgtacaccggcctcgcgggtgtaatagcgcacgatgtcacggatcgcctcgacctcgaactcgatctcgcctttcttcaggccattggccgacgtctgcttgggcgcgaggtacttgacggcaatgttgatcttctcgtcttcggtgtaacccggcagacgaatcacctccattcggtccagcaacgcgggcgggatgttcatggagttggaggtgcacaggaacatcacatcggagaggtcgtagtcgacttccaggtaatggtcgttgaaattgtggttctgctcggggtcgagcacttcgagcaaggcagacgccggatcgccacgcatgtcgctgcccattttgtcgatttcatcgagcaggaacagcgggttgcgcacacccacctttgtcatcttttgaatcaatcttcctggcatcgaaccgatgtaagtgcggcgatgaccacggatttccgcttcatcacgcacaccgccgagggccatgcgcacgaatttacggttggtggcgttggcaatcgactcggcgagtgaggttttacccacacccggtggaccgaccaggcacaacaccggcccgcgaatctttttcacgcgtttttgcacggcgaggtattcgaggatacgttccttgacttcttccaggccatagtggtcggcatcgagaatgtcctcggcacgcgccaggtccaggcggaccttggtctgcgccttccacggcacctgcaccagccagtcgatgtaggagcgcaccacggtggcttcggccgacatcggcgacatctgcttgagcttgttcagctccgcagtggccttggtcagggcatctttcggcaggccggcggcatcgatgcgctttttcagctcttcaatttcgttgtggccttcctcgctgtcgccgagctccttctgaatggccttcatctgctcattcaagtagtactcgcgctgactgcgctccatttgtttcttcacgcgaccacgaatgcgcttctcgacctgcaacaggtcgatctcggcatccagcagtgccagtacatgctcgacacgggccggcaggtcgatgatttcgaggatgtcctgcttctgctcgatcttcagcgccatgtgcgcggccatggtgtccaccaggcggcttggctcatcgatgctgttgagggaggacaggacttcagccgggactttcttgcccaactgcacgtactgctcgaactgcgagagcaggctgcgtacaaacacttcggactcgcgctcaggggcctcgacttcgtcgatcagcgccacttcggcgcgcaggtggccgtccacctccatgaaccgctcgaccgcgccgcgctgctcaccttccaccagcaccttgacggtgccatcaggcagtttgagcagttgcagcacggtcgcaatggtaccgacgcgatacagggcatcttcgcctggatcatcatcggcaggatttctctgggccaacagcaggatctgcttgtcgcccgtcatcgcggcctcgagggcttcgatagacttctcgcgccccacgaacagcgggataaccatgtgcggatagacgacgacatcacgcaacggcaggagaggcaattcgatggttgtcttcatgatttcgcctctatgacagttcaaaaattagcttgaaaccaagatgggggctgcatgcaaaaaaaacaagcttattgccagcagttaaacgcagtaaacgctccggcgtaaaaaacgccgtaaaaacaaaggggcccctggaggccccttgtttataccgacactgcgaaacgcttacgcgtcgggcgcagctttggcagccttggcagccggctcactgttttcatagatgtacagtggcttggacttgccttcgatcacgctttcgtcgatcaccactttactcacctcggactgcgaggggatttcgtacatggtgtcgagcaacacgccttcaagaatcgaacgcaggccacgtgctccagtcttgcgctccagtgcccgcttggccactgacttgagtgcatcggtacggaactcgaggtctacaccttccatctcgaacaacttggcgtattgcttggtcagggcgttcttcggctcggtgaggatctgaatcaaagccgcctcatccaattcgtccaacgtggccaggaccggcagacggccaacgaattccgggatcagaccgaacttgaccagatcgtcaggctcgacttcacgcagggactcgcccaccttcttgccttcttccttgctgcgcacttctgcactgaaaccaatgccaccacgggtggaacgctgctggatcactttttccaggccggagaacgcgccgccacagatgaacaggatgttgcgtgtatcaacctgaaggaattcctgctgcgggtgcttgcggccgccttgtggcggtacggaagcgaccgtgccttcaatcagtttcaacagtgcctgctgcacgccttcaccggaaacgtcccgggtgatcgacgggttgtccgacttgcgcgagatcttgtcgatttcgtcgatgtagacaatacccatctgggccttctctacatcgtagtcgcacttctgcagcagtttctgaatgatgttctcgacatcttcacccacgtagccagcctcggtgagggtggtggcgtcggcgatggtgaacggaacgttcagcaggcgagcgagggtttctgcaagcagggttttacccgagcctgtaggaccgatcagcaagatgttgctcttgccgagttcaacttcgtcgcctttcttgtcacgctggttcaagcgcttgtagtggttgtataccgctacggccagaaccttctttgcacgctcttgaccaatcacatactggtcaaggatgccgctgatttctttaggcgaaggcaatttatgcgcgctgctctcggcctgggcttcctgcacctcctcacggatgatgtcattgcacaggtcgacgcattcgtcgcagataaacaccgaggggccggcaatcaatttgcgtacttcatgctggcttttgccacagaaggagcaatagagcagcttgccgttgtcctcgccgttgcgggtgtcagtcattcgttcgatccaaatccgataggcttgcaacacaagatgaaggcttatgcgggctttttcaagcccgccagtggtcggacatgccgaccagccctattttgagcggcttatattaagcgggacgctgggtgatcacttcgtcgatcaggccgtatgccttcgccgcatcggcactcatgaagttgtcgcggttggtgtcgcgctcgatttcttccagggtgcgcccgctgtgcttggccatcaacgtgttgagacgctcgcggataaacaggatctccttggcgtgaatctcgatatccgacgcctggccctggaaaccgcccagtggctggtgaatcatcacgcgcgagttaggcaggcagaaacgcttgccctcggcaccggcagtcaacaggaacgcgcccatgctgcaggcctggccgatgcaggtggtcgacacgttcggcttgatgaactgcatggtgtcgtagatcgacatgcccgctgttaccgaaccgcctggggagttgatgtagagatggatgtccttgtccgggttttccgcttcaaggaacagcagctgcgcacagatcaggttggccatgtagtcctctacggggcccaccagaaagatcactcgctccttgagcaggcgcgagtagatgtcgtaggcgcgttcgccacgagcggactgctcgacaaccatcgggaccaggccgccagcggcctggatatcagagttctgctgaatataggaattacggaacatgctctgcagttactcccaaatagtcatgtcttgaaaacgcataagccagcgcgaggctggcttatggttgaatttccaacgagttggacaatcagtcggcttgtgctgcttccgccggtttgactgcttcttcgtaagagaccgctttatcggtcaccttagccttctgcagaacagtatccacaacttgttcttccagcacaaccgaacgcacttcgttcagttgctgatcgttcttgtagtaccaagccacgacctgctcaggctcctggtaggccgaagccatttcctggatcatttcgcgaacgcgatcttcgtctggcttgaggtcgaactgcttgaccacttcagccacgatcaggcccagcacgacgcggcgcttggcttgctcttcgaacagctcggccggcagttggtcaggcttgatgttgccaccaaactgctgaacagcttgaacgcgcaggcgatccacttcgttggacagcagggccttaggcacttcgatcgggttggcggccagcagaccgtccatgacctggttcttgaccttggatttgatggcctggcgcagctcacgctccatgttcttgcgaacttcggtgcggaaaccttcgataccggtttccttgataccgaattgcgcgaagaattcttcgttcagctctggcagcttaggctcggaaacggtgttgacggtcacggtgaactcggcggctttgccagccaggtccaggttctggtagtcagcagggaaagtcaggttcagaacgcgctcttcgccggctttggcgccaaccaggccgtcttcgaaacccgggatcatgcggttggaacccagcaccagctgagtacccttggcggagccgccagcgaagacttcgccgtcaaccttgccaacgaaatcgatgttcagctggtcttcgttctgggcagcacggtcggccacttcgaaacgggtgttctgcttgcgcaggatttccagcatgttgtccaggtccgagtcagccacttcggcgctcaggcgctcgatggcgataccgtcgaaaccggccacttcaaactcagggaacacttcgaatacggcaacgtattccaggtctttgcctgcttccagggacttaggctcgatcgacggcgaacccgccgggttcagcttttgctcagtgaccgcttcgtagaaagaagcctggatcacgtcacccacagcttcctggcgcgcatcggcaccaaagcggcgcttgatttcgctcattggcactttgcctggacggaaaccagcgatcttggccttctgggcagtctgctgcagacgcttgttgaccgcagtctcgatacgctcagccggcacggtgatgctcaggcgacgctcgatagcagtagtattttcaacagaaacttgcatggatattcctcgttgcacagacgttagccggccatttccgaccccaatcaagggcatgcattctagtgggtcaaactcaagaagtcaccctactgcaaatacacccgaaaacagccagcaatttatcggtacgaaggcactgatgcaccccgccccggtgacaaatacagcccatcacgccagggctctgcgccgccccttctatatatagaagaagtcgtcatccatctccctgacggccaacccttcaaacgggactggcaggcagcgcagcatcatcgagatacataaatacgacgaaacgccctgccgttgcgacccagtgactgcgaccgcggaatattcgaaccgctaaaaccaaaaaaggcgccagactgttaaatctggcgcctttcgaatatggggtggacgaaggggatcgaaccctcgacaacgggagtcacaatcccgtgctctaccaactgagctacgcccaccatattgcgttaacaaagaaaccaaaccacttctttgtctagccttaccctgcttctcaacaaggcgaagctttatttggtgcggatgaagagactcgaactcttacgcctcgcggcgctggaacctaaatccagtgtgtctaccaattccaccacatccgcgcttgaagctcttaaagcaaaggcgccagacgattaatctggcgccttttaaaatatggggtggacgaaggggatcgaaccctcgacaacgggagtcacaatcccgtgctctaccaactgagctacgcccaccatctgacgctacttgtgccaaagctgcctaatggcgcacccggcaggactcgaacctgcgaccatccgcttagaaggcggatgctctatccagctgagctacgggcgccttattaatctgtactcttggaggattacaaactaagtgcttccagccttgcagaacaacacgctattctgctcgaccttcttaaccagtgctaggctgtgcccgacaagtgcgacgaatagtatagacgccctccaaacccgtcaaatcttttttgaaaaaaattcattttatttaaggggttagggcaatttgcagaccaagcgcctttgccctcacgccttggcatgcgagaatgcgcgcacttttcttccccctctcgatggttaatcacgcgtaatgactgcacaacttatcgacggcaaatcaatcgccgccagcctgcgccagcagatcgccaaacgagtcaccgagcgcagccagcaaggcctgcgcacgcctggcctcgcggtgatcctggtcggcagcgatcctgcctctcaggtttatgtctcgcacaagcgcaaagactgtgaagaggtcggctttatttccaaggcctacgacttgccttccgagaccacccagcaggcccttaccgacctgatcgacggtctcaacgacgacccgaagatcgatggcatcctgctccaactgcctctgcccgagcacctggacgcctccaagttgctggagcgcattcgcccggacaaagatgtcgacggcttccacccttataacgtcggccgcctggcccagcgtatcccgctgctgcgcccatgcacgccgaaaggcatcatgaccctgctggaaagcaccggtgtcgacctgtacggcctcgacgccgtggttgtcggcgcatccaacatcgtcggtcgcccgatggccatggaactgctgctggccggctgcaccgtgaccgttacccaccgcttcaccaaggatctcgccggtcacgtcggccgcgccgacctggtcgtggttgccgccggcaagccgggcctggtcaagggtgagtggatcaaggaaggcgccatcgtcatcgacgtgggcatcaaccgccaggaagacggcaagctggtcggcgacgtggtgtacgacaccgccctgccccgtgccggctggatcaccccggtacccggcggtgtcggcccgatgacgcgcgcctgcctgctggaaaacacgctgtacgccgcagagaccctgcacacctaataaccgggcgtactgaaaaagccctgccttatcgcagggctttttattgcccgcaataaaccctatttttcttagtttttaagaactttcgtccggttctagaagaacattcgacagtttctgatccatactcctaaaatgtaacggcatttatccaaaacccgtttccgaacggtatttccttactttttagcgagttcatccgcgtgaaaattcgtctctctattgtcagcctattttttgcgtttacaggcaccttcgctcacgccgccgaaaccacccaggccccgcgtgacacctcgaaactgcaaatcgcctccggcagcgccatgctggtagatctgctgaccaacaaagtcatctactccagcaacccggatgtggtggtgcccatcgcctcggtgagcaagttgatgaccggcctggtggtgcttgaagccaagcagaacatggatgagtacatcgacatcaacatcaaggacacgccggaaatgaaaggcgtgttttcccgcgtgaaaatcggcagcgagatgccgcgtaaagaaatgctgctgatcgcgctgatgtcctcggaaaaccgtgccgccgccagcctggcgcaccactatccgggcggctacccggcgtttatcgccgcgatgaacgccaaggccaaggcgctgggcatgaccagcactcactatgtggaacccaccggcctgtcgatccacaacgtgtccaccgcccgggacctgagcaaattgctcgccgccgcgcgtcactatccgttgctcagccagttgagcaccaccaaggaaaagaccgtgtcgttccgcaagcccaactacaccctgggcttctccaacaccgaccacctgatcaaccgcgccaactgggacatcaagctgaccaagaccggcttcaccaaccaggccggccactgcctggtgctggtgaccagcatgggcaaccgcccggtgtcgctggtgatcctggatgctttcggcaaattcacccactttgccgatgccagccgtatccgcaattgggttgaaaccggcaagagcgggtcggtgccggatgtggcgttgcgctacaaggccgacaagaacctgaaaaatcggccgaatgctgcagaagcgcgtcgataaccaaccattaaaaaacggcgcttgatagcgccgttttttatttgcgctccgccaacaccttcagcgcctgggccgccgcccgctccttcccggcctgggccgtcgcgttagccgcatcccgccagcgctgcgcgtcgacattggctggcaactggctcgggcgctgggtgaggattgcccagtttccggcacttttccattttgactcgaagtcgccgaagctcatcaacaggcgccggtccatgcctgagcgcagcaacaccgtgcttttctgctgattgaaccccaccactaccacgtagtgcgcgtcagaccacagcccgccgccaatccgcgccatcaccggataacccgccgccacctgcgccagcaccgccgtcaactttgcatcgagcgggtacaccatcagcccgtactcacgcgccagcacctgcatgttgcgttcaaggtccgcttcgccacccggcaaatgcaacggcttatccagcaaccccggtgtcatgacaatgccttgttgcgacagcatgctggctaacgatgtaggaccgttctgataagcctcgctacgaaaggtcggcacgccattgagttcgacacgctccggcaggcccgccagcctcgacggtgtggaggaacaggccgctaggcccagggcacaagcaagcaacaaggatgtttgaaggttcgaccgtaaccgcaattttctactctcttgatcgactgccggtaatggccctgatcatagcccaatcgcgtttgtgtagggcgcgtggatatagcaaagaagttggttggactcgaccattggtcaatagcaggcaaccgcccggtagctagactgtccattgagaagactgtgtgtgcccgtaggggcgaaaggaggcccgaatgagccttgcaacgacgattttactgctgatctgcggttggctggcggtagccggcgccatgttgtggggggtgttgcgtattacccgccggcaccatcacccccacgccaaacccgttgcacccgccaagcctcacaaggccgcggtgcatcacgcctagcctggcatgcaattgaagtcctgcgtcgccgcgacttccttgccgtgcccgtccatcaaggaggcgcgcacggtggtgcccaggctggattccaccagggtgtagtgctcacccgctctgaaatgcttgtactcgacacgtccctcgcagtcctgctggttgtcgtcgccgggttcttcctcgaacagcgtcacatccaggcgatgatcccccggcggcacttcaaaaaagcgtccgtcatccacgcgcttgccatctacccgctcggccatcaggtcattcggcgcttcttctttcagaccaatccacgcttcgctcgggtcagccttggggatcgggccggcgcatgccgacaacaacagcgcagcaccgagggcaggaatcaacaatagaggtttgagtgacatggcagggctccaaaacaggacaaggcgtccaatgggttgcaagcttgaggagcagccctttgtagaacaaatgaatacatatgaaacgatcttcagcccttacctaaatgttccttcacctggctgaaaggtgcgtgttaggtgggtcgcgtgagactgccggggtttgcaatcctgctcctttcggaggtttcacgcatgctcgggctggtaaagaccgcactgcaaaagccatacacctttatcgtgttggccatcttcatctgcatcatcgggccgatggcggccctgcgtacccccactgatgttttcccggatatcggcatccccgtggtcgccgtggtctggcagtacaacggcctgtcgccggacgccatggccggtcgggtgatctacacctacgaacgctccctgagcaccaccgtcaacgacatcgaacatatcgaatcgcaatccttgcccggcatgggcatcgtcaagatcttcttccagcccggcgtggatatccgcaccgccaatgcccaagtgacggcggtttcacaaaccgtgctcaagcaaatgccacccggtatcacgccgccgctgatcctcaactacagcgcctctacggtgccgattctgcaaatggcgttttccagccccagcctctcggaagccaggatccgcgacctggtgcagaacaacatccgcctgcccctcagcgccctgcccggcctggccatgccgacgccgatgggtggcaagcaacgccagatcaccctcgacctcgacccgcaagcgctggctgccaaaggcctgtcggcgcaggacgtgggtaacgccctggcactgcaaaaccagatcatcccggtgggcaccgccaaactcggccccaacgaatacacgatcctgctcaacaacagccccaaggccatcgacgaactcaacgacctgccgatcaagaccgtcgacggtgcgctgatcacgattggccaggtggcgcacgtgcgtgacggctcgccaccgcagaccaacatcgtgcgcgtcgacggccaccgcgccgtgctgatgccggcgctgaaaaacggcagcatttccaccctgtcgatcatcgatggcatccgccagatgctgccgcgcatcaacgaaaccctgccgccgtcactgaagacctcgctgctcggcgacgcttcggtgttcgtcaagcaatcggtgggcagcgtggcccaggagggcatcattgccgcactgctcaccagtgcgatgatcctgctgttcctcggcagctggcgttcgacgctgatcatcgccgcgtcgattcctctcgccgtgctctcggccatcgcgctgctggcggccagcgggcaaaccctcaacgtgatgacgttgggcgggctggcattggccgtgggcatcctggtggacgacgccacggtgaccatcgaaaacatcaactggcacctggaacaaggcaaggcggtgaagaccgcgatcctcgacggcgccgcgcagatcgtcggcccggcgttcgtctcgctgctgtgtatctgcatcgtgttcgtaccgatgtttttgctgcaaggcatcgccggttatctgttccggccgatggccctggcggtgatctttgccatggccagttcgttcatcctctcgcggacgctggtgccgaccctggcgatgttcctgctcaagccgcacacgccggagccaggcgccgggcatcacccggaagatgagttcatcaaccaccacgagggcgagcagcacccgaaaccgcgcaatcgcgtgctgcaatcggtgctgaatttccagcagggcttcgagcgtcacttctcgaatatccgcgacacctaccacagcctgctgaccttggccctaggcaaccgcaagcgttttgtcgtcggcttcctggcctgtgtactggcgtcgttcctgctgctgccaagcctgggccaggatttcttcccggccaccgacgccggcgccctggccctgcatgtgcgcttgccactgggcacgcgcatcgaagaaagcgccgcggccttcgaccgcatcgaggcgcggatccgcgaaatcatccccgccgaagagctggacaccatcgtcgacaacatcggcattccgctcagcggcatcgacatggcctacagcagcagcggcaccatcggtccgcaggatggcgatatccaggtcaccctgaaaaaagaccatgcccccaccgccgactatgtgaaaaaactgcgtgaagccttgccggaaagctttcccggcagccacttcgccttcctgccggcggacatcagcagccagatcctcaacttcggcgcccccgccccgctggacgtgaaaatctccgggcgcaacgacgaagagaaccgcgcctatgcggtagaactggagcgccgcctgcagcatgtacccggcatcgccgacctgcgtatccagcagtccaccggttacccgtcgctgcaggtgaatgtcgaccgcctgcgcgccaatggcctgggcatcaccgagcgtgacgtgaccaacagcatggtcgcctccctcgccggcagttcccaggtggcgccgacgttctggctcaacccggccaacggcgtgtcctactccatcgtcgcggctaccccgcaataccgcctcgacagcctgccctcgctggaagccctgccggtgaccggtgccgacggccagtcgcagatcctcggcggcgtagccaccatctcccgcgtgcaaagcccggcggtggtcacccactacaacatcgagccgaccctggacctgtacgccaacgtacaaggccgcgacctcggcggcgtggcccgcgacgtgcagaaagtgctggatgacaccgcctccatgcgtcccaagggcgcggtgatcagcctgcatgggcagatcgatgcgttgcatgaggcgttcagcggcctgagctttggcctgctcggtgcggtggtgctgatctacctgctgatcgtggtcaacttccagtcgtgggtcgacccgttcgtgatcatcaccgccttgccggcggcgctggcggggatcgtgtggatgctgttcctcagcggcacgtccttgtcggtgccggcactgaccggcgccatcctgtgcatgggcgtcgccacggccaactcgatcctggtggtgagcttctgccgcgaacgcctggccgaacatggcgatgcgctcaaggcagcgctggaagccggctacacgcgcttccgtccggtgtgcatgaccgccctggcgatgatcatcggcatgttgcccctggcaatttccgaagagcagaacgcccctcttggccgtgcggtgatcggggggttgattctcgccaccaccgccaccctgttgtttgttcccgtggtcttcagcctggtccacggtcgtcatcctacccgcgcagttgctggagaaagcccacatgtcgtctgatcacaaaccctcgcgcaagcgtctgatgctcatgggtgtcggcggcctgaccctggccgccctgttggtcgccaacggcctgcacgcccgcaccttgcacgaacagtcggtcaccgcctggaccgagaccgccgccatcccgcaggtgatggtgttccaaccgcagcagaacgcggccggcgataccctgcgcctgcccgcacacttggaagcctggagcaaggcgccgatccatgcccgggtcagcggctacctcaaggactggaaagccgacatcggcacccaggtcaaggctggccaggtcctcgccgagatcgacagcccggacctcgaccagcaactggcacagacccacgcacgcctggtgcaggaacaggccaacgcacgcctggccgccaccaccgccacgcgctggcagaacctgctggccagccactcggtgtcgcgccaggaggccgatgaaaaaacttccaatgccgccgccgccaaagccaacgccgaggccgccgcggccgactacgccaggctgaccgcactggaaagctacaagacgattcgcgcgccgttcgccggcaccatcaccgcacgtaacaccgatatcggccagttgatcaaggccgacaccgacagcgacccggaactgttcaacatcgccgacacccaccaattgcgcctgtatgtgccggtgccgcagaactacgcggcggtcatccaccccggcctggaagccgaattgactgtgcccgagcatcccggcgagcacttcaaggcgcgcctgatcggcgactccaccgccatcgaccgccgttccggcaccctgctcgcgcagttcgtggccgacaaccccaacggcgagttgctgcccggtgactatgccgaagcgaccctgccgatcccggcggacacccatggcgtgagcatcccggccagcgcgttgatcttccgcgcccagggcacccaagtggcggtgctggacgcgcagaatcacgtgcacttgcaggacatccatatcggcctcgacctcggtgaacgcctggtcatcgaccaaggcctgaaacccgccgaccgtgtggtcgacaacccgcccgacgccctgcgcgaaggcgacccggtgcaactggccgacgccgctggaggttcgcatgcgcccaaggcttaagcccctcgttgcactgatgctgctggctctacagggttgctcgatggcgcccacctacaaggtgccgccgattgacctgcctgcgaactatcgcgagcagaccagtgacggcccctggcacagcgcgcaaccgtccgatcaactggcacccgaatggtggcagctctaccacgattcacgcctgaatgacctgcaacagcaactgctcaaggccaaccccgacctagcggcggcactggcacacttcgacgcgtcccaggcgtatgccagccagctacatgccggcctgttcccgcagatcaccgccagcgcgcagccgttgcgccagcgccaatcggattcacggccgctgcgggggaccacgcagccgtcggtgtacaacagcaatacagcgggtttctcgctgagttacgacctggacctatggggcaaaatccgcaaccaggtggcggccggcgatgcccaggcgcaagcatcgggggatgacctggcggtggcgcgcctgagcttgcagcatcaactggcgagcctgtatgtgcagctcaatgggctggatgcacaggcgcggatcctcaacagttcgctggatgatttcagccaggcgctgcaactgacccgcagccggtacgagggccagattgcttcagagctggacctgacgcgagcacagaaccaactcgccgaagccaaggcgcagctggatgaagtccgcgggcaacgcaacctgaccgagcatgccatcggtgaactggtgggcgtggcggccagcgatttctccctgccgccgagcccgcaattgattgcactgccgggcatcccatcgcagctgccaagccatctcctgcaacgtcgaccggacattgcagcggcggaacggcgggtgtttgcggccaatgcgaacataggtgtagcaaaggccgcgtggtacccggatttcagcctgaccgggttgattggcgggcagacgcaaggcgtcggcaacctgctgtccgccggcaatcgctattgggcgctggggccgctggtgaatctgccgatctttgacgggggccgcttgagcgccaacgagcgccaggccaaagccgaattcgaagaggcatcggcgcactaccgcagtcaggtgctgaaggccgtgcgcgaggtggaagataacctggcgcaactgcgggatttgcagcaggaagcgcaggatgaacaggcggcggcggatgcggcagagcatacacaagccttggcgatgaacagctatcaggccggggccgtgagttatctggatgtggtgaccgcgcagacggcggcgctgcaggcgcaaaggacgttgcaggcggtgcagacgcggcagttgcaggcgagtgtggggttggtgacggcgctgggtggtggctggcagccgggtgcttgataaggtgggtcagtcacataactgtcaactgaactaccgcaatcgggggcaagccccctcccacacttgtcctgtgccagacacacaatgtatgaacgccgcagaactaatgtgggagggggcttgtccccttccaccctgctcctgtgccagacacacaatgtatgaacgccgcagaactaatgtgggagggggcttgcccccgatggcgttcttccagacacatcctgccaaaagccagcccgtcagccttttacgcaccgatctagcctctctgaacacaccttgagagggccagggaatggcagatttacccgcttcacatcggctgcgcatcggacgcttcagcgaacccaaccgcatctacctgatcaccaccaacacccacgaacgcctaccgatattcagcgacttccacctcggtcgactggtggtctggcagtttcgcctggctcagtaccgagggctcgcaaactccctggcgtgggtgatcatgcctgaccactttcattggcttattgagttgaaaaaaggctcgttggcggacctgatgcggcaggtaaaatccaagagcacgcggtccgtcaacggcctaagcggacgcaagggaagactctggcaggaaagcttccatgaccgggcactgcgcaaggaagatgatctagtgaagatggcgaggtatgtagtggccaatccattgagagcaggcctggtgaaaaagatcggcgactacccattgtgggatgccatctggatctaacatcacacactgttcaaatgtgggagggggcttgcccccgataacagggtgactgacccaccgctatcgggggcaagccccctcccacatttttttctaccgtatttcaggcggctaacttgccgctggcgattgcggcggaagctgccaccattgcgcgtaatagaaccgcacacccagcagccaggtcatccggcgcggcattctcgatttcgttgtggctgatgccgccctcgcacggtacgaaaatcatccccgccgggccaagttcggcgacgaaaattgcgtcgtgccctgccccactgacgatgtccatgttcgacaagcccaggccattcgccgcattgcgcaccgcgtctacgcagccctgatcgaaatacagcggcgggaagtcagcggtgggctccatctcgaaactgagcccatgcttggtgcaggtgtcctcaatgaccttgcgcacctcactgatcatcgagtccaggcgggccggctccaggtgacgaaaatccagggtcatgcgcacttcaccgggaatgacgttgcgcgatcccggataagcctgcaggcaacccaccgtgccacatgcatgaggttggtgccccaatgcagctgcgttcaccgccgccaccaccgctgccgcgcccaccagagcatccttgcgcaggtgcatcggcgtcggccccgcatgcgcttcaaccccccgcagtttcaggtcgaaccacttctgccccaaggcgccgagcaccacaccaatcgtcttcttctcatcctcaagaatcggcccttgttcgatatgcgcctcgaaatacgctcccaccttatgcccgctcacaggccgcgagcccgcatagccaatcgcattcagcgcatcgcccacgctgacgccatccacatcgaccttggccaaggtatcggccagggtgaatttctcggcaaacacccccgagcccatcatgcatggcggaaaacgcgagccttcttcattggtccacaccaccacctccaacggtgcctcggtctccagcttgagatcattgagcgtacgcagcacttccactcccgccagcacaccaaaacagccatcgaacttgccgccggtgggctgggtgtcgatatggctgccggtcatcaccggcggcaggttggggttgcgtccggggcggcgggcgaagatattgccgatgccgtcgacggtcacggtgcagccggcgtcttcgcaccactgcacgaacagatcgcgggccttgcggtcgaggtcggtgagggccaggcgacacacaccccccttgggcgtggcgccgagcctggccaggtccatcagcgattgccacaggcggtcgcggttgatgtgctgatcggtggattgcagaacgtccagggcagcgttcatggggatctcctcaggctacatttcttcttatggattgacggtgaccggcgtggccccgcgcttggcattcaggccgtaatacaacaacccacccagcgccgaaccggtaaaccagccatagctgtagaaccagctgaacgcatcgctgcccaacgacagcaaggtcagcaccaccggcacgccgaacgcgatgaaaccgctccagttccatgccgggtacaggtcatcgcgatacaggccggccaggtcgagttgctgtttgcgcgtgatgaaatagtccaccaccatgatcccggcgatcggccccaacaggctggaatagccgagcaaccagttggagtagacggtctccaggctcacatcggaaacaatcaggccgagttttttcagcagctcatgggccatcaacgccagcccgaccaggccggtgaggatcaccgccgtggtgcggttgatcagcttgggcgcgatgttctggaagtcgttggtgggcgagacaatgttcgccgcggtgttggtggacaaggtggcgacgatgatcagcgccatggccacggccacccacaccgggctctggatatgcccgatcagggtcaccgggtcggacacgctgacgcccaccagtttcaccgaagcggcggtcatgatcacgccgagggcggcgaacaggaacatggtcagcggcaggccgaaaatctgcccgaggatctggtccttctggcttttggcgtagcggctgaagtcaggaatgttcagtgacaaggtagcccagaaccccaccatcgcggtgagcccggccatgaagtaaccggtgaggctcgcaccctcgggacgcttgggcgggatcgccatcaattcgctgatcgacacgttgggcatcgcccacaccagcaggccgatccccaccgccaccagcaacggtgccgacagggtttccaggcgcttgatcgactcggcgccacgcagcaccacccacaggttcaggcaccagaaaatcatgaagccgatcacctcgcccgtgccgccaagggacttccacccctcgaagatcgagcccaggaacaggtggatcgccaacccgccaaacatcgtctggataccgaaccatccgcacgccaccagtgcccgaatcagacacggcacgttcgaaccaaggatgccgaatgacgagcgcagcaacaccggaaacggtatgccgtacttggtgcccggaaaggcgttgagtgtcagcgggatcagcaccacgatgttcgcgagcaggatcgccatcagcgcctcgcccaccgacaacccgaaatacgcggtgagcaccccgcccagcgtgtacgtgggcacgcagatcgacatgccgacccacagcgcggtgatgtgccacttattccaggtgcgttcgtgcaccttggtcggtgccatgtcgtggttgtagcgagggctgtcgaggacgtcggggccggcgtcgagttcgtacaggccgttgcgctcaatgacttgcgatctgttctgttgcatggccgctccacggttttttcgaattattgttgcgcgcctgcagttgagtgcaggcggccggagtacctcgtaaacaacatgacatcacgggcccggccagccgcctctgcactcaataaccgtgccgacaagcgttaccgcaccctcaccgcttatataacgtgctgatgtttatcagctttccgattgcgccttgggtacttgccgcgttactcaggctaaatagtgcggaagttgtccgaaccatcaggactcaatctggtgcaacacaattatttttatttcccctgcccgtcaagaggcatgtctcaagcgtctgatttgcaataagaaatgttgctcaatttaagaacctgtcaagtgcgtcaaaatggtgagaggtcgctacattttggtgattattgatttttatccttataaatcaatagattgaaaactatataggcttataaaaaatcttcttgcccaatcgaaaaactcgggctagtttctattcctgtcaccgatgacaggaattaaccgaccatcggcaagcagcactacaacacttagaactggcacaagccggtcaagcctgtgaggaactcgacatgtcgctgttgatccgtggcgccaccgttattacccatgatgaaagttaccgcgccgatgtgttgtgcgcagacggtctaatccgggctattggtacgaacctggatattcccgccggcactgaactactcgatggcagcggccaatacttgatgcccggcggcatcgacccccatacccatatgcaactgcccttcatgggcaccgtggccagtgaagactttttcagtggtacggcggcgggcctggcggggggcaccacgtcgatcatcgatttcgtgattcccaacccgcagcaatccttgctggaggcgtttcaccagtggcgcggctgggcggaaaagtcggcctctgactatggcttccacgtggcgatcacctggtggagcgagcaggttcgcgaggaaatggccgagctggtcagccaccacggcatcaacagcttcaagcatttcatggcctacaagaacgcgatcatggcggcggatgacaccctggtcgccagcttcgagcgctgccttgaactgggcgcggtgcccaccgtgcacgcagaaaacggcgagctggtgtatcacctgcaacgcaagctgatggcccagggcatcaccgggccggaagcgcacccgctgtcgcgtccgtcgcaagtggaaggcgaagcggccagccgcgcgatccgcatcgccgagaccctcggcacgccgttgtacctggtgcacgtctccaccaaagaagcgctggacgagatcacctacgcccgtgccaaaggccaaccggtctacggtgaagtcctcgccggtcacctgttgctggacgacagcgtctaccaacaccccgactggcagaccgccgccggctacgtgatgagcccgccgttccgcccacgcgggcaccaggatgcactgtggcacggcctgcaatcgggcaacctgcacaccaccgccaccgaccactgctgcttctgcgccgagcaaaaagccgccgggcgtgacgacttcagcaagatccccaacggcaccgccggtatcgaagaccgcatggcgctgttgtgggacgaaggcgtcaacaccgggcgtctgtcgatgcaggagttcgtggcgctgacctccaccaacaccgcgaagatcttcaacctctacccgcgcaaaggtgcgatccgtgtcggcgcggatgccgacctggtgttgtgggacccacagggcacgcggaccatttcggccaagacccatcaccagcaggtcgacttcaacatcttcgaaggcaagaccgtacgcggcgtgcccagccacaccatcagccagggcaagctggtctgggccgatggcgacctgcgcgccgagcgcggggccggacggtatgtggagcggccggcgtatccgccggtgttcgagcagttgagcaagcgggctgagcattccaggccagtagctgtgaagcgctgagaccgctatcgggggcaagccccctcccacattgaccccattccaacaggatcaacgcggtcaagtgtgggagggcgcttgctcccgatgaggccagtgcaagcaacaaaaaaaccactgcccatcagaggcagcacctcaataaccgtgaggccaacaccgtgatccagaccctgacccacctcccccatcccgttgaagatggagcgaccctcgccagccacttcaccgacctggccacccccctcaacgcccgccaggcccaactggaagcctcgcgctgcctgtattgctacgacgcgccgtgcgtgaacgcgtgccccagcgaaatcgatatcccctcgttcatccgcaacatccacaccgaaaacgtgcaaggcgcggcgcagaagattctctcggccaacatcctcggcggcagctgcgcgcgagtgtgccccaccgaaatcctgtgccagcaagcctgcgtgcgtaacagtgccaaagaatgcgccccagtgctgatcggcctgttgcaacgctacgccatcgacaacgcacacttcagcgaacaccccttccagcgcgccgcgcccaccggcaaacgcatcgccgtggtcggtgccgggcctgccggactggcctgcgcccatcgcagtgcgttgcacggccatgatgtggtgatcttcgaagcccgggaaaaagctggtggcctcaatgagtacgggatcgccaaatacaaattggtggacgactttgcgcagaaggagctggatttcctcttgcagatcggcggcatcgagatccgccacggccagcgcctgggggacaacctcacgttgagcgaactacaccagcaattcgatgcagtgttcctcggcctcggccttgccgcgagcaaacaactcggtttggcgaatgaagacgcccccggcctgctcgccgccaccgactacatccgcgaactgcgccaggccgacgacctcacccaactgcccctggccgaccgctgcatcgtgctcggcgcgggcaataccgccatcgacatggccgtgcaaatggcccgcctcggcgcccgcgatgtgaacctggtgtaccgccggggcctggcggacatgggcgccacccaccacgaacaggctatcgccaaggccaatcaggtgcgcctgctgacctgggcccagcccgaagccgtgctgctggatgacctgggtcatgtacgcggcatgcgcttcctgcgcacgcacatggaaaacggccgcctgcaccctaccggtgaaaccttcgaactggccgcagacgcgatcttcaaggccatcggccagggtttcgacaacgaggcgctgcacgacccgctggccgagcaactgcaccgcgtcggcgaacgcattttcgtcgacgagcagctgcgtaccagtgttcccggggtgtacgccggtggcgattgcgtcagcctcggccaggacctcaccgtgcaggcggtgcaacacggcaagctggccgctgaagccatgcacgcccaactcatgctgactgtggaggctgcgtaatgaccgatctctcgattgtgttcgccggtatcaaggcccccaacccattctggctggcctccgcgccgcccaccgacaaggcctacaacgtggtccgtgcctttgaagccggctggggtggcgtggtgtggaaaaccctcggcgaggacccggcggcggtcaacgtgtcgtcccgctactcggcgcactacggcgccaaccgggaagtactgggcatcaacaatatcgagttgatcaccgaccgctccctggagatcaacctgcgggaaatcacccaggtgaaaaaggactggcccgaccgtgcgctgatcgtgtcgctgatggtgccgtgcgtcgaggaatcctggaaaaacatcctgccgctggttgaagccaccggctgcgacggtatcgagctgaacttcggctgcccccacggcatgcccgaacgcggcatgggcgcggcggtgggccaggtaccggagtacgtggagcaagtgacgcgctggtgcaagacgtactgctcgctgccggtgatcgtcaagctcacgccgaacatcaccgacatccgcgtggcagcgcgagcggcgtaccgtggcggtgcggatgcggtgtcgctgatcaacaccatcaactccatcaccagcgtggacctggagcgcatggttgccctgccgatagtcggcacccagagcacccacggcggctactgcggttcggcggtgaagccgattgcgctgaacatggtcgccgagatcgcccgcgacccacagacccagggcctgccgatctgcggcattggcggcatcggcaactggcgcgatgcggcggagttcgtcgccctgggctgcggcgcggtgcaggtgtgcacggcggcgatgctgcatgggtttcggattgtggaagagatgaaggacggactgtcgcgctggatggacagccaaggctacaaaagcttgcaggaattttccggacgggcggtgggtaatacgacggattggaagtacctggatatcaactaccaggtgatcgccaagatcgatcaggcagcctgcattggctgcgggcgttgccacattgcctgtgaggatacgtcgcaccaggccattgccagtctgaaacaggcggatggtacgcataaatatgaggtgattgatgacgagtgcgtgggctgcaacctgtgtcagatcacgtgcccggtggccgaatgcatcgagatggtgccgatagataccggcaagccgtttttgaattggacgcaggatccgcggaacccctatcgggaggctgtgtaggccttaagaccgccatcgggggcaagccccctcccacattttgaataggttcataaatcaaagtgtgggagggggcttgcccccgatgaggccctcagcccccacagagatcaaggctccaacccaatcccccgcaagatcacactggtcaccgtctggatcgccttctcgaactgcatatccgacaacggctggtgatcattcaaaatcttcacctggtgatcaaagtccgcatagtgctgggtcgaggcccagatcatatacagcaggctcgacggctccaccggcaggatgcgcttgtcctccacccactggcgaatcttcgcttccttcatcttggcccagtcgtacaggctttcatccagcgcctcacccagggtcggcgcgccgtggatgatttcgttggcccagactttcgaaccgtacggccgcgtgcgcgagcgctgcatcttggcgcggatgtagctgctgagcaccacccgggggtcatcgaaggtttcaaagctcagggcgtcctgcttccacacttccagcaggtcgaacagcaccgcgctgtacagctcgctcttggtggtgaagtagtaatgcaggttggagcgcggcagttgcacttcttcagcgatatcggccatggcggtgctgccatagcctttttcggcgaagattttctccgcagccagcaggattttttcgacgttgactcgacgaattccgatcttgtgattgcccataagggctccctgacgaagacatgccccagagactaccatccgctctagatcggggcgacaagcgaagtcgaaacttcgtacacttcacgctcctacccattgattggtattgcccaatgttgatcaagaaagccctgactgccgtcgccctgctcgcctccctgttgggcgcctcggccgcatttgcccatgcccacctgaaaaacgccacccctgctgccgacagcagcgtcgcagcgcccaaggacctgcgcctgaccttcagcgaaggcgtcgaagccaccttcaccaaggtgtcgctgagcaaggacggcaccgaaatcgcgatcaagggcctggaaacaccggacgccgacaagaaagtgctggtggtcaccccggccgccccgttggccgccggcacctacaaagtggtgtggaacgcggtctcggtcgatacccacaagagcaacggcgaatacagcttcaaggtcggccagtaacccgtggctaccctgctggtgctgtgccgtttcctgcatttcagcgtcgtgttgttgatgttcggggcctgcgcattcaggccctggctgctcggcgctgcaccgcaaccggcgctggaccggcaacttgagcggatcacccgtggactggcctggctggggctggggtccggcgtcgcctggctgttactgatcaccgcgagcatggccggcagttgggacgcggcgctgcagccggccacggtgcagctggtgctgggcaagaccttcttcggccaggtgtgggtgtggcacctgttgctgaacctgctgctggtgatcgtgttggccaaaccctggccgatggtgcgcctgccagtgatcgcgctgctgctggcgacactggcaccggtcggccatggcgccatgctggacgggctcagcggcagattgctgatcctcaatcaggtggtgcacctggtgtgtgtcggtgcctggctcggcggcttgctgctgttggtgttgatccagcgccaatccccgcctgttgcgctggagccaatcctgcgacgcttcagcggtgtgggttatggcctggtcgccggcttgctggtgactggcttgatcaacgtgcgcgtactcaccgggcaactgtggcccacgccgttattcaacggctttgccctgatcctgttgatcaaggtgctgctggtgctgggcatgttggccctggcgctgctgaaccggctgcgtatcgagcgctgtgaagaacgcttgggcagcctgaaggccagtgtgaagctggagtgggtgctggggattgccgccgtcgccgccgtttccctcctgggcaccttgccgccgatgctgatggttgactgaaacacaccgtcatcgggggcaagccccctcccacattgaacctccacaccgagcaggtcatcgtataacttctacttgacagcgcctgaaaacctcgcaaatatcgcacccaatgttgtacgacaacgtataacaaataataaaaacaacaaaagaaagggagcttcactgtgagttcactcgcgcgcaattcctccgtccgcctgggttttatcggtctcggcagcctggccttcacccttcccctcaacgcccaagccgaaggcttcgtcgacgatgctaaagcgacgctcaacctgcgcaacgcttacttcaaccgcaacttcaccaacccgagcaaccctcagggcaaggccgaagagtggacgcagaacttcatcctcgatgccaagtccggctacaccacaggcacggtgggcttcggcattgatgtgctgggcctgtattcgcaaaagctcgacggcggtaaaggcactggcggtacgcagttgctgccgatccacagcgatggccgcccggccgataacttcgggcgcctgggtgtggcgctgaaaaccaaattatcgaagactgaactgaaagtcggcgaatggatgccggtgctgccgatcctgcgctccgacgatggccgttccctgccccagaccttccgtggcggccaggtcacctccaatgagatcgccggcctgaccctctacggcggccagtttcgcggcaacagcccgcgcaacgacgcgagcatggaagacatgttcatgaacggcaaagccgcgttcacctccgaccgtttcaatttcggtggcggcgaatacaccttcaacgacaagcgcacccaggtcggtgtgtggtacgccgaactcaccgacatctaccagcaacggtatttcaacctgacccacagccaacccgtgggcgactggaccctgggcgccaaccttggctttttcaccggcaaggaagacggcagcgcgctggctggcgacctcgacaacaagaccgccttcgccctcctctcggccaagtacaacggcaacaccttctatgtgggcctgcagaaactcaccggcgacagcgtgtggatgcgggtcaatggcaccagcggcggcaccctggccaacgacagctacaacgccagctacgacaacgccaaggagaaatcctggcaggtgcgccatgacttcaacttcgtggtgctcggcattcccgggctgaccctgatgaaccgctacatcagcggcagcaacgtgcacaccggggcgatcaccgatggcaaggaatgggggcgcgaatcggagttggcctacacggtgcagagtggcgcgctgaaggatttgaacgtgcgctggcgcaactcaaccatgcgtcgggatttcagcaataacgagttcgacgagaaccgcctgttcatcagctacccgatttcactgctctaaaggtgacagaagcagtgcgacgattcgcacttgccccccgtggcggcggaccagaggcatatctgctgcctgacacactgccatcgggggcaagccccctcccacatttgagcaatgccagcctgaagagcgttgacaagccggggaatcaataacgatacttcggcaaagtcatacgacaacctacaacaacaatggaacctacatgaccaccctcaccaccccgcccgttccattcaaccgcctgctgctcaccggtgccgccggcggcctcggcaaagtcctgcgcgaacgcctgcgtccctacgcccacgtgctgcgcctgtcggatatcgccaacatggcgccggctgccgacgcgtccgaagaagtgcagacctgcgacctctccgacaagcaagccgtgcaccacctggtggaaggcgtcgacgccatcctgcatttcggcggcgtatcggttgagcgttcgttcgaagaagtgctcggcgccaatatctgcgggattttccatatctacgaagccgcccgccgccacggcgtgaagcgtgtgatcttcgccagttccaaccacgtgatcggcttctacaagcagggcgaacacctcgacgcccactcgccgcgccgcccggacagctactacggcttgtccaagtcctacggcgaagacatggccagtttctacttcgaccgctatggcatccagaccgtgagcatccgcatcggctcgtcattcccggagccgcagaaccgccgcatgatgcacacctggctgagtttcgatgacctgacccaactgctcgaacgcgccttgtacacgcccaacgtcggccacaccgtggtgtatggcatgtcggataacctcgacacctggtgggacaaccgctacgccgctcacctgggctttgcgcccaaggacagctccgaagtgttccgtgcccaggtcgagggccagccgcccgtagccgccgatgacccggccaaggtctatcagggcggcgcgttctgcgcggccggccccttcggtgattgacccatgaacgccgaattgattgtcgacgcgcgcaatgccgtgggtgaatgcccggtgtgggtgcccgaggaaaatgcgctgtactgggtagatattcccaacggcggcctgcaacgctggagcgccgccaccggccatctcgccgcctggaaagccccgcagatgctcgcctgtatcgcccgtaccgatgcgggcaattgggtcgccggcatggaaagcggctttttccagcttaccccgtacaacgacggcagcctcgacaccacgcccttggctggagtcgaacacccccgtgccgacatgcgcctgaacgacggccgctgtgatcgccagggccgcttctgggccggcagcatggtgctgaacatgggcttgaatgcgcccgagggcatcctctaccgttacgcttccggcgccgtgcccaatgcacaactggacggtttcatcaccctcaacggcctggcgttcagcccggatggccgtacgatgtacgcctcggactcacaccccttggtgcaacagatctgggccttcgactacgacatcgacaccggcacgccctccaaccgccgcgtcttcgtggacatgcacaactacctcggtcgccccgacggcgcggcggtagacgcagaaggctgctactggatctgcgccaacgacgccggcctgatccaccgtttcacccccgacggccgcctcgaccgctccctcaccgtaccggtaaaaaagcccaccatgtgcgccttcggcggcagccgcctggacaccctgttcgtcacttcgatccgtgacgaccagagcccccagtcgctgtccggcggcgtgtttgccctcaaccccggcgttgtcggattgccggagcccacgttcaccctctagctgcatcgctgtgccttgaatacaacaataacaagacaggaatgaacccccatggacttcaaacgcaccttgctcgccgctgcatgcttctccctcgccagcgccgcccacgccctggaaatcaagttcgccgacatccaccccgccggctaccccaccgtcgtcgccgaagaaaacatgggcaaggccctgaccaaggaaagcaacggcgaactgaccttcaagtacttccccggcggtgtgctgggctccgagaaagaagtggtcgaacaggcccaggtcggcgcggtccagatgacccgtgtcagcctcggtatcgtcggcccggtggtgccggacgtgaatgtgttcaacctgccgttcgtgttccgtgaccaggcgcacatgcgcaaggtcatcgacggcgagatcggcgatgagatcctcgccaagatcaccgattcggaattcggcctagtggccctggcctggatggacggcggaacgcgcaacctctacaccaagaaaccggtgcgcaagatcgaagacctcaagggcatgaagatccgcgtgcaaggcaacccattgttcatcgaagccttcaatgaaatgggggccaacggcattgccatggacaccggcgagatcttcagcgccctgcagaccggggtgatcgacggtgcggaaaacaacccgccgaccctgctcgaacacaaccacttccagaacgccaagtactacaccctcaccgaacacctgatcctgcccgagcccatcgtgatgtcgaaaatcacctggaacaagctcactcccgcccagcaggacatggtgaagaaagccgccaaggccgcccaggcggacgagcgcgtgctgtgggacgccaagtccgccagcagcgaaaccaagctcaaggccgccggcgtggagttcatcaccgtcgacaaaaagcccttctatgacgccaccgcgccggttcgcgccaaatatggcgcggcttacgccgacatcatcaagcgtatcgacgccgtccagtaacgccctccttctctagcaaggcccggcgcggtcggtatcgacgcgcccggttacggtgaacgccatgaagaatttactgctgcgcatcaacgaccgcctatacatgacctgcatctgggtcgccggcctctcggtactgggggtcgcgctgatcatcccctggggcatcttcgctcgctacgtcctcggcaccggcgccagttggccggagcccaccgccatcctgctgatgctgatcttcacctttatcggcgccgccgccagctaccgcgcgggtgcgcatatgtcggtggcggtagtgactgaccgcctgccgccacgccaacgccacatcgccgctatcgtcgcgcaactgctgatggccaccatctgcctgttcatgaccgtgtggggcaccaagttgtgcctgtccacctggaaccagttcatgagtgccatccccacactgcgcgtaggcatcacctatatgccgatcccgatcggtgggctgctgacgctcgtattcgtactggaaaaactcctgctcggcgaccagagccagcggcgcgtggtgcggttcgacctggtggaagaaaacgaaggggctgcctgacatggatgcattgattctgttgggcagttttatcgccttgatcctgctgggcatgccagtggcctatgccctggggatgtcggcactgatcggcgcgtggtggatcgacatcccgttccaggccttgatgatccaggtggccgggggcgtgaacaagttttcgctgatggcgattccgttctttgtactggccggggcgatcatggccgagggcggcatgtcacgtcgcctggtggcgtttgccggggtattggtgggttttgtgcgcggcggtttgtccctcgtcaacatcatggcctcgacgtttttcggcgccatctccggttcgtcggtggccgataccgcctcggtcggctcggtgctgatcccggaaatggaacgccgtgggtatccacgggaatttgccaccgccgtgaccgtcagcggttcggtgcaggcgttgctgacgccgcccagccataactcagtgctctactccctggccgccggcggcacggtgtccatcgcctcgctgttcatggccggcgtggtgccgggcctgttgatgagcgcctgcctgatggtgctgtgcctgatcttcgcgaaaaagcgtaactaccccaagggcgaagtcatccccttgaagcaggcgctgaagatcgccgcagatgccctgtggggcctgatggccatggtgatcatcctcggcggcatcctctcgggcatcttcaccgccaccgaatcggccgcgattgccgtgctgtgggcgttcttcgtgaccatgttcatctaccgcgactacaaatggcgcgagctgcccaagctgatgcaccgcacggtgcgcaccatttccatcgtgatgatcctgatcgccttcgccgccagcttcggctacatcatgaccctgatgcagatcccggcgaaaatcaccacggcgttcctgaccctgtcggacaaccgctacgtgatcctgatgtgcatcaatgtcatgctgctgttgctcggcacggtgatggacatggcgccgctgatcctgatcctcacgccgatcctgctgccggtggtgctcgggctcggtgtcgacccggtgcacttcggcatgatcatgctggtcaacctcggcatcggcctgatcaccccgccggtgggcgcggtgctgttcgtgggcgccgcggtgggcaaggtgagcattgaaaaaaccgtgaaggcactgctgccgttctatgcggtgctgttcctgatcctgatggcggtgacctacattccggcgctgtcattgtggctgccgagcgtggtgctgtgatgctgatcgaactggaagacaacctgacccacctcaccctggccccggccgtgggtggcagcatcgtcaattggcgcgtgcgagccagcggccagccattgttgcgccacagcgaccaacaggccctggacacgggcctgccgggcaaactcggctgttatccgctggcgccctggtccaaccggatcgccgaagggggtttcgataaccccgacggctggctggccctcacgccgaacagcctgaccgacccactgcccattcacgggtcggcctggcaacaagcgtggcaggtggtcagccagtcggcggacgaagtggtgctgcaactggtgtgcgacacaccgttcgcctatcgcgctgagcagcggttttgcttgcgcgacggcgagctgagcatcacgttgcgggtgactcatctggcggacaaaccggcgtggcacggcttgggattgcatccctacctgccgcgcacagcgcaaacgcggttgcaggccaaggcctcgcaggtgtggatgagtgccccgtcgaaactgcccacggagctggcaccggtacccgccgcctgggatttccagacgttgaagaccttgccggaaggcctggtggacaacggtttttgtcagtgggatggacattgcctgatcgagcaaccggagctgggctatgccctggagtgccaggccaccggcgccgactacttcctgctgtactgcccgccggggctggggttcttttgcatcgaaccggtgagccatccggtgaatgcccatcacctggcggggcggccgggcctgaaactgctggaacacaagcagtcggtacaactcaatttcaagctgaaatacatacaacatgtgggagggggcttgcccccgatggctgagtgtcaggcaacagatgtttgactgataaaccgctatcgggggcaagccccctcccacagttttgatttgcgttgtgtcagggtggagcgtttttcaggcgcccggcagtgtcgatactgacgaccaccgacaaccccggccgcaatcgctcgctctcggcctggttcgggtccaccgtaatccgcaccggcacgcgctgggcgatcttcacgaagttgccggtggcgttatccgcctgcaacaggctgaactccgaaccggtggccggggaaatatgctgcaccgtgccgtggaatttgcggtggttcaaggcatccaccgtaaaggtcaccggctggccgacctgcacgttgtccatctgggtttccttcatgttggcaatcacccacagctgcggcggcaccagcgccatcagttgcgcgccggagttgacgtaggcacccaggcgcacgccaatctgccccaactgaccgtcacgcggcgcagtgatgcgggtgttggacaggtcgatacgtgccagctccaccgccgcctcggcactcgctacggcggcttccagggagccacggttgacgatcaccgtctgcaggtcctgccgcgcgatttccaggctggcctgggcttgcgccacggcggcgatggtctgcgcattggcggcgcgggtcacgtccagctcgcgtttggacaccgagccgtcgctgatcagttcttcattgcggcgcaaatcggccgtgcttttgcgcgcctgtgcctggctgtccaccaaggctgcctggcgcaacttgatggtcgcttcggcgctgttgcgctgctgcaccacattggccagcgaggccttctgcaccgccagttgcgccagcgcctggtccaggcgctgtttgtagatgcggtcgtcgaggcgcaccagcaggtcgccggccttcacgtattggaaatcctgaaccggcacttcaaacacatagccgctcagttgcgggccgatgatcgtgacctgcccacgcaccagggcgttctcggtggtttccacggtgctgctgaacggcggcaattgccaggcatacagcacgatcagcacgccgacgatggcaatcgcggcaaagcccagcgatgagacgatgcgcacccgcagggagcggggctcggtgaccgaggcgccgggcggcgtggtgccttccggggtggcggcgatggcgttggtggtcgtggtggtggaagtcggttcggtcatgaagaagcgccgctgggttgaacgggaggggctgctgttttggtcgtgctcatcagccacaggctgcggataaagatccagatcatggtcagtatcgcgatgatcgcgatcagcatgaagacatcgttgtaggccatcacgttcgcctcacgggtcgccgccgtagccaggctgcgaatgcccatgaggttgcgcaactcggggtcggcgacaatgccgccgtaggccgagccgccgctttgcacccgcgcggccacacgcgggtcgagcagggtcaggtgctcgacgatcatgctggagtgatatttctcgcgcacgatctggaacgtgcccagcaacgccgcgccaatcaggccgccgaggttctggcagataccgaacatcaccgagaaactcaccaggttgcgcgggttggtcagcacgttcttcgtgcccaataccatggtcggtcccaggaagaacgtaccgccgaagcctagcaggaactggctgatatacaggttctgcggccgggtcaggttgctggaaaaactgtccatcaccgacccggtggccatcagtgccagggaaatcaccagcggcatcaacaggtgcgccgggttgatggtcaacgcactcaccgccagcccggcaatcgcccctgcgagcatcaccacatacagggtgtgcatctgctggtagctcatgttcaacatctgcatgaaacccacggcgccggtggactgctcggacaacaccatgcggatcaggatcaccgccagcgccaggcggatcatcacgccgctgcccagccagcgggtcatcagcatcgggttggcgcggttatgctcgatggccagcccggccatgatcagcaccagggaacaggccgaggcgatgccgatccacggtgcttccagccaccagtcgatgcgacccagggacagcacggcgcagagcaaggcgacaccggtggcaaggatggcgaaggtgacgaagtcgagtttttcaaaggtcttgaagcggtcgccgggcggcaacttgagcaagaacacgcagcccaggcagatcagcgccaggcccagctcgaacagatacagcccgcgccattcggcgatttgcagcaggtcttcggagaacagccgtgccaatggcaaggccaactgcgccgtgcccaaccccagcaccagggacttcaagcgccacttggccgggaaggcctggatcatgtagtacaaacccagcgaactcagcgccgcgcccaccatgccatgggccgcccgcaccgcgatggccgagctgaggtcgttgacgaacaagtggccgaaagtcaccagtgcgtacagcaccaggaacacctcggtaaatgcacgcagcccgaactgctggcggaacttcaccagcagcaggttcatgcacacattggtcatcacataggcggcgggcagccaggccatttcggcggtggtcgcgcccagtgcaccttgcaggtattgcaggttggcgatgaccagcgcgtttcccaacccgccagtaatcgccaccagcacgcccaccatcgcgaacagccaacgcttgtgcgtcgggtgcagcggcgtagacggcgaaccgggcaggctcgggcgctcgtggggctcccaggtgtggggggtgtatttgttcattcgatgactcaggtaaacccatactcagagacagtaaacctgagcggagttcatcttgccatgtcgagggcataattgatgcgaagaacaggcatcacctgaaatgtgcgagggcaagtcgactcgtcgccctgcccccctgggatgtcctgcgtattcagatccagccgagccaactccagtaggtcgcagcgaataccagcatcaacaggtagccaaccagcgtcaccagaacccccaccttggcgaactgccgcgccgtgaacgttccggtccccaggcacaccatgttctgcggcgcattgatcggcaggataaacccgtagctcatcacaaaccccaagagcatggtcatgcccaaccggctgaaatcccccggcaaggtctgcaacaccgcgatcaggatcggcagcaacgccgaggtcaacgcggtggcgctggcgaagcccagatggatcaggatcaggaacgcaccaagaatcgcaaacacacccagcggccccacctggtcaagcccggtatgcgccaccacttgcgcgcccagccattgcccggcctgggtggtcagcagcgccgttcccaggctgatgcctaccccgaacacgatcaccgttccccacggaatgcgcgactgcacatccttccaggtcatcacgccgatacccggcaataacaggaacaccaggccggcgtaggtggtcgaggtggtgtcgaaactgtgcaggcgcccttccgtggcccaggccagtagcagcaacaccgaaacgctcaacaggcgcttctgcgcgccggtcatcggccctatctccaccagcgactgcgccaccgcctctttaccgccggggatgctgtcggtctccggcggcagcaacttgagcacgaggaacagcaacaccgccgacatgatcaacgcccacggcgcgccggcaatcagccagtcgatccacgacacgcgctggccaagcatcttgtccatgaaaccgacggtgagcaggttctgcgcggcggcggtctggatgccgacgttccagatgctggtgccctgggccaccacgatcatgatgccggcggcgatattcgagcgtttgtccacgccgaacgcggcgatcacacccatcatgatcggcaccacgcaggcactgcgcgccgtggcgctgggcaccacgaggctgagcagcaccgtcaccgcaatcgcccccagcaggatgcgccgggtgctggtgccgacccggctcagggtcaccaaggcgatacgccggtccaggccggtgtgggtcatggctgctgcgataaacagcgccccggccaccagcgccagcgccgggttggaaaacccggtgagcgccatgctgatcgccgggctggtgccgatcacatgcgcggggtcctgcaacgacggcgcggtgcccagcagaaaggccatcagcgacgtgatcatgatcgcactggcttcataggacaccgcttcggtgatccacaccaccacggcaaacgcgaggatcgccagcatgcggtgcccggcgaccggcaagtcggcgggcaccggcaacagcagcaccccggccatcaccaacacggcgacgaccaggcccaggggtaatttgaaagatgccgcactcatgggccactccaaggctctagatcaggccttgagcatgggctaaaagcacctgcgacgtgttgacctaggccaacaactggctcaacacggcccgcaacttgccgggtttgaccggcttgttcagcaacggcgcttccaaccggcgcaacgccctgcggcactggtcggtgcggtcggcggtaatgatcacggccgggatgttcagttcgaaatgctcacgcaggtgcttgaccaccgcacaccccaccaccccatggtcgaggtgataatcggccaggatcagttccggcgccctgccctccaacgccagcaacgctccggcctggtcggtggcggtgaccacatcacagccccattgcccgagtagcgcgcgcatgctgtcgaggatgctcacctcgttgtcgatcaccagcagacgccgtcccggcagcgggttgccggtggtcggctgggctggcaactggctgatcggcagagggatctcggtgctcaacggcacctcgatactgaacatcgagccacgtcccggccacgagcgtacggcgatggggtaacccaggatctcggcgatccgctcgacaatcgccagccccagcccaacgcctttacggtccgctgcgcggccgacgtcgagctggttgaactcgaggaagatcgcctccagccggtcctgcgcaatcccgcgcccggtgtcccagacctccaggcgcaggcaatcgccacgcttgcgcgcgcccaacaggatgcaaccttcgtcggtatagcggcaggcattgctgaggaagttacgcaaaatccgcgtcagcaagcgcaagtcggtgctgatcgcatagcagcccgtgtgcacccgcaggttcaaccccgccgcctgggccaccgactggaactccgagaccagcggcgcgaacagttcgtcgaggcggtacagcgccacatccggcttgaccgccgcctggtcgagccgcgagatgtccagcaagtcggtgagcaagtcctcggcgccctccagcgcctgatgcgtgcgctccaccagcacctgctcgacgctgggcaactgccgttcgcgcaaggtggcaatcaacaagcgtgcggcgttcaacggttgcaacaggtcgtggctggcggcggcgaggtatttgtccttgctgcggttggcggcctgggcggcgtcgcgggcgtcgcgcaggtcctgttcgatctgctcgcgctgggcgatctgctgttgcaggttgtggttggcttccagcagttcatcggtgcgtgcggcgacccgctgctccaactcgtcattgagacggatatagcgcttgcgctcagcctccagctcatccagccgcgccgtgagttccgggtaatggctcttgcgcgccgactggtcgcccagccccagcaacccggcgagtgcgcgttgctggtcgtcagagagcttcgccatagacgacctcgacgtcacgctggctcgactccctcgggttggtgaggatgcacggatcgcccatcgcatgctgggacaggaacggaatatccgccacgcgcacgccatgcaggcccagggtttcgtggaagccgatcgcccgcttgagcgcgatcaaatgctccaccagccgcgcgcagatctgccggtgattgaggccgcgacagtcgatgccaaacgtctcggcaatcaccttgaaacgctccggcgccgagctgtagttgaacgccaccacatgctccaccagcaccgcgttgcacagcccatggggcaggtcgaggaagccgccgaggctgtgggacatggcgtgcaccgcgccgaggatcgcgttggagaacgccagaccggcctgcatgctgccgagcatgatcttctcgcgcagggcgatgtccgtagggttggcgatcatctgcaccaggttgccgttgatcaggcgcattgcctccagcgcatgggggtcggtgagtgggccgtggccggtggaaacgaacgcctcgatcgcatgcaccaacgcatcgatgccggtgcaggcagacaggaacgggtccatgctggcggtggtttccgggtcgatcagcgacacatccggcaccaccgccttgctgacgatggagaacttcatgcgttcctgctggttggaaatgatcacgaactgcgagacatccgccgaggtgccggcggtggtgggaatcaggatcagcggcgggctgggcacgcgaatggtgtcgacgccttcgaactcaaggatgctgcgcccgtgggccaccacaatgccgatggccttgccgcagtccatggggctgccgccgccgatggcgacgatcacatcacagtgatgttcacggtacacctcggcgccggtcattacctcttcgacacgcgggttgggcgagacggcgctgtacaggcagtagtcgatgccgagggcttgcaggctggcttccacatcggccacccaaccggcggcgatcacgccggggtcgctgaccaccagcaccttgcgcgcgccgaaggtcttggcgtagttaccgacgttgtgccggcaaccggctccaaagatgatttcaggcgagacgaatttacgcaggaggctcagatttgggctcattggaaagcctgtttttattattttggaagaatgcgctcaacactaaccgatccggctgcgaatgcaatcagaccaaagaggcatccttccgacagtacccgcgatcaacggctagcgaagtacatggtcacttcgaagccgatacgcaggtcggtaaatgcaggtttggtccacatgggggcagtcctcgggttgggccggaagattccggtggggtcattaatgcatggggggatggggtagcgaatgctactttcgaagtattaagcgcactgcattagtcgcgaatgtgcagagaccaaaatgtgggagggggcttgcccccgatggcagtgtgtcagtcaatatgtaggtcactggcataccgctatcgggggcaagccccctcccacattggacagcatttcaagtcaggtctagaagaaacccagcgggttgatgtcgtagctcaccagcaggttcttggtctgttggtaatgatccaacatcatcttgtggttctcacgcccgacgcccgattttttgtacccgccaaacgccgcatgcgccgggtacaggtgataacagttggtccacacgcgaccggccttgatcgcccggcccatgcggtaggcgcggttgatgtcgcgggtccacaggccggcgcccaggccgaactcgctgtcattggcaatcgccaacgcttcggcttcgtccttgaaggtggtcacgcccaccaccggcccgaagatttcctcctggaacacacgcatcttgttgtggcccttgagcagggtcggctggatgtaatagccgctggacaggtcgccttcaaggcgctcggctgcgccgccggtgagcagcaccgcgccctcctcctgggcgatcttcaggtaggagaggatcttgtcgtattgctgctccgaggcctgggcgccgaccatggtctcggtgtccagcgggttgccgcgcttgatcttgacgatcttttttatcacttcggccatgaacggttcgtagatcgactcctgcaccaaagcccgcgacgggcaggtgcacacttcgccctggttgaagaacgccagcaccaggccttcggcggctttctcgatgaattgcggttcggcctgcatgatgtcttcgaagaagatgttcggcgacttgccgcccagctccacggtggacggaatgatgttctcggccgccgcatgcatgatgtgcgcgcccaccggggtggaaccggtaaaggcgatcttggcgatgcgcttgctggtggccagcgcctccccggcttcgcgaccaaagccctgcacgatgttcagcacgccgggcggcagcaggtcgccgatcagctcggcaaacaccatgatcgacagcggcgtctgctcggccggcttgagcacgacacagttaccggcggcgagtgccggcgcgagtttccacgcggccatcagcaatgggaagttccacgggatgatttgcccgaccacgcccaatggttcgtgaaaatgataagccgctgtgtgctcgttgatctcggcggcgccgccttcctgggcacggatacacccggcgaagtagcggaaatggtcggcggccaggggcacgtcggcgttgagggtttcgcgcacggccttgccgttgtcccaggtctcggccacggccagcacttcgaggtgttgctcgatacggtcggcgattttcagcagcaccagggcgcggtcctgggccgaggtcttgccccaggcatcggcggcggcgtgggcggcgtcgagggccttgtcgatatcggcggcgctggagcgcgggaactcggcgatgacgtcaccggtgaccggcgaggtgttggtgaagtactcaccgttgatcggcgcgacgaactcaccgccgatgtaattgccgtagcgcggcttgaagctgacgatggcgccgggggtgccaggttgggcgtagatcatggtgaggcctctgcttattgttgggtgttgatgggctgcatctgggtgcgttcgtagtgcgggtacaggtgggtcacgctgcgggtcagttcatagcggctctggttgatgcccgcgaatcgctcggggatcgggctgcggatcagctctggcatgtcgctgccatgggctgccccgtcgcgtagcaattgatcgagccaggtgaggtagtcacgcatctgttcgaagggtttggcgtcggtcgcaatggggccgtggccgggcacgatcagggtccagggcaagccttgcagggtggcgatgtccgccagccagatcgccagccccggtgaatggggcgtggtaagcgcacgttggtagaacaccaggtcgccggcaaacagcacgccggtcttgcggtcgaggatcgccaggtcggcgccggtgtgcccgcgcagttgcagcagttgcaggtcgtggctgccgaagtttttcacaccgggctgcagcgtttcgccgggcagtaccacttcggtgccgcgcatccagtcgccgaccatgcggtacaggttctcggccatgctgtcgccctgctcatgcagcaaatcctgggtaccggccagggcgccaatcggcacgtccttgaaggcttggttacccagcgcatggtcgggatggtggtgcgtcagcagcacctggatcaccggtttgtcggtgatgcgggcgatggcctggcgcagggcttcgccgtagcgcctggacggtccggtgtcgatcaccaccacgccgggctcggtgacgatgaacccgacattgacgatattgccgccgttgtccttggcgaaattgtcggtgctgccttccagcagccaggtgttgtcggcgatcaaacggggcttgagggcgtaatccagatccgccagcactggcaggctgaacagcagcagccacagcagaatccagcgcaggttcatgggatggccgcctcgaactggctaccgctggtgtcgcgcagggtcaggcgcgtggggccgccgccttcgatgtcgaaagccaggctggggttttcgctgaccgccgggaacagttccaggcgtgccagcagttggttatctgcgccgcgcagctcggcctggttgatgaagaattcggggatgccgctgaccatgccgttatccatcggatgggcgacttgcagtttcacgcggctgaactcggcgcgtgggtaacggccgccgagcacttcgcccaggtgttcttcccaacccggttgcgtgcgcaccacgctgggcgccgtgcagccaccgccagcagcatcgatcaaggccgagccgacatgccacatgccatctttggtgagcactgctgcacgcagcggcgtggcctgttcgatacgaatccgcagcgacagccacggcagcaccagcccctgcggctggaaatcgacgatctgcggcagcgggttcagctccgcccaggcgaggatcttgactacgtcgcccttgaacgcccgcgcatcgatctccagcggcacctggcgcgcatcctcggcgaacggcggcgccaagagcctcacgcgctcatcgaacacaaacgctgcattgtcgagaaagcgctggtgatagtaggcccacatcaccgagggcaccgggtccacgggcgcgccccaggccagcatcggcacacagcacaaccaccacccgcgcaggcccatggcttactcctcgacgtgcacgctgtcgaggtaggtacgcaccgcccacagggcttcctggctgaggtagtcggccattttcggcatgtacacccggccatcgcgcacggcgccgtggcgcacgcgctccacaaaccattcatcgccggcgtcgccggcatcgagcatgcgcaggtcgggagcgatgccaccggacttggcttccaggccatggcacgccgcgcagttctggttgtaggccgacgcaccgacctccaccgccttgtcatgctcgggtgtggtgcgataggggttggtggcggcccagccatcggcgtccagcggtacgccggcgtccttgatcggggtgaggcctttggtttccacggcggtgggcgtcacgttgccgtgggcccaggcggaacctgtactgattgcaccggcgagcaggcaggcggtcatcaaggcgttgcgttttgttgtcattatttttccctcgggagtgcacgcaaaacctcttggcagaggctatggcaaccatcttaggaagcacccggcaggacccgtatgctgctttggtgggcgggttctcatccgttggtagcaggccttgtggggcactgctaaatcagaggcggttcgggaaattgtcccggcaacaccgggactttttccgtattcgccacggcgttcacatcgcaccctgtgcaggccaaaacctccactgggaactgcaaccatgacaataagatcgctacccgccctctcgccgctgagccttgccgtgcaggccttcctgctggttggcagcctgtccttgagtgcggccagcttcgccgccgccgagcctgccaaacagacccgcaacgtcacctgggaagacatcgccaacgaccacctgaccacccaggacgtgctgcaatacggcatgggcaccaacgcccagcgctggagcccgctggcgcaggtcaacgacaagaacgtgttcaagctcacgccggcctggtcctattcgttcggcgatgagaagcagcgcggccaggaatcccaggccatcgtcagcgacggcgtggtatacgtcaccggctcctattcccgggtgttcgcccttgatgcgaagaccggcaaacgcctgtggacctacaaccaccgcctgcccgacaacattcgcccgtgctgcgacgtggtcaaccgcggcgcggctatcttcggcgacaagatctacttcggcaccctcgacgcgcgcctgatcgccctcgacaagaacaccggcaaagtggtgtggaacaagaaattcggcgaccacgccgccggctacaccatgaccggcgccccggtgctgatcaaagacaaggtgaccggcaaggtgctgctgatccacggcagctccggcgatgaattcggcgtggttggccagctgtatgcgcgcgacccggacaccggcgaagaggtgtggatgcgcccgttcgtggaaggccacatgggccgcctgaacggcaaggacagcaccccgaccggcgacgtcaaggcgccttcgtggccggatgacccgaccaccgaaaccggcaaagtcgaggcctggagccacggcggcggcgcgccttggcagagtgcgagcttcgatgccgagaccaacaccatcatcgttggcgccggcaaccccggcccgtggaacacctgggcgcgtacctccaaggacggcaacccccacgacttcgacagcctctacacctccggccaggtcggcgtcgacccaagcaccggcgaggtgaagtggttctaccagcacacgccgaacgatgcctgggacttctccggcaacaacgaactggtgctgttcgactacaaggacaaggatggcaaggtcatcaaggccaccggccacgccgaccgcaacggcttcttctatgtggtcgaccgcaacaacggcaagctgcagaacgccttcccgttcgtcgacaacatcacctgggccagccacatcgacctgaagaccggccgccccgtggaaaacgaaggccagcgtccagccaagccattgccgggcgaaaccaagggcaagccggtggaagtctcgccgccgttcctgggtggcaagaactggaacccaatggcctacagccaggacaccgggctgttctacatcccgggcaaccagtggaaagaggagtactggaccgaagaggtcaactacaagaagggctcggcgtacctgggcatgggctttcgcatcaagcgtatgtatgacgaccacgtcggtaccctgcgggcgatgaacccgaccaccggcaaggtggtgtgggagcacaaggaacacctgccgttgtgggccggcgtactggcgaccaagggcaacctggtgttcaccggcaccggcgatggcttcttcaaggccttcgacgcgaagaccggcaaggagctgtggaaattccagaccggcagcggcatcgtctcgccgccgatcacctgggaacaggatggcgagcagtatatcggcgtgacagtcggctacggcggcgcggtgccgttgtggggcggcgacatggcggagctgaccaagccggtggcacagggtgggtcgttctgggtgttcaagatcccgagctgggacctgaaaaccgctcagaagtaacctcaccctatatgccggggtcatcctttgtggcgagcgggcttgtcccgcgttgggctgcgaagcggcccccggcttttctccagccccaacgagccgtcaggttttggggctgctgcgcagcccaacgcggggcaagcccgctcaccacagcaagcccgctcaccccaggatccccagaggtctcgcgatgaaatatctgccctttttaatcctgctatccctgcccttggctcacgccgacgagggcgacgacgcccccctggtcatcaacggctgtaccattgccgaacacagccaatgccccggcgcccacctcaagggcgccaacctgagcaatcaagacttaagcaaaatgaacctggccggcgccgacctgcgcgacgcagacctgcgccacgccaacctcgacctggccaacctggaaaaagcccagttgcaaggcgccaacctgacccgcgccagcctgcaacaagccaacatgcgcctggcggatttcaccggtgccacgctgatggccgtgcaaggctgggggctgtttgcccagggcgcacaatttgaaaacgccaacctcagcgccgcctacctgcaatttgcccggttgtcgggggcgaagctgcaccaggccaacctgcgggcggccgacctggaaatgacctggctgagcaaggccgacctacaaggcgccgacctcagcgacgccaacctgcaagaagccaagttcggcgaaagcaacctggagaaagccaccctcaccggcagccgccagcactatgcgaatttccaggatgcgaacatggaaggttgcaaggactgcccgaccacctgggaccgttaacccgccacccgcaccacccccatgtcgatacccaaatgcaccaactcggcatgggaactcacctgcaacttactcttgagcaaggtcaggtgattggacacggtcttgctgctgatactcaactgagcggcaatcgcgcgcgccggggtgcccttggcgagcatcaggaaaatctccagctcacgctgggtcatgctttgcaggcgccggtcggtggggtggtacgccagctgggtggccaggtcctgttcgatataggtgtggccgtcaagaatgcgctccaccgcatccagcatcaccgccggcaacgcgcttttggtcaggtagccggacgcaccggcctccaacgcctggcgcaccaagggcaactcagcatgctggctgaaaaacagcacgcgcaattgcggcaagcgctggcgcaggcggcgggtggtttccaggccgctgatccccggcaggccgaagccgatgatcaccaggtttggcaccgcttcgtgcacccgcgccaaggcatcctcgccactcgccgcttcgcgcaccaccacaccgggcagcccgctgcgcaatagcccggcgtaacccaggcggaccacggcgtgatcatcgaccagcaggatattcatagtgcctccaatggcggtgcctctggccatgctagaaccccggggaccaatgggacctactactttggtactggttttgctgtctatcgtcgcattcccaaggcagcaggactggcgtgtaatgggcgcataacgataaggattggatccgccatgctgcccgctcgactgccccttgcggcactgttgtgcctgttcatcacgtacgtacaggccgacacgccactgttttccgccgatggctaccgcaccagcctgtaccgcagccccacgcccgaacacctgcctggggcgatcatcgtcgacaccccagccctgcaaaccctgttgacccagacgcccgcaccggtactgatcgacgtgtaccgccgcccgtggctacagggccgcttcatcgaagaccagccccacgccaacctgcccggcagtcactggctggccaataccggcgacggcgacctcacgcccgagtggcaaggttactttgtgcgccacctgtacaagtacacgggcggcaacctggcccgcccgctggtgttctactgccgcgccgattgctggctgagttggaacgcggtaaaacgggccgccaacctgggctataccactgtgtattggtaccgcgatggtttggatgcatgggaagcggcagacctgccagtaatggctgcgacacccgaaccctttgaataaaaaaccacaacaagaaggtgaacggccatgtacaaaattctgattgccgacgatcacccgctgtttcgcgaggcgatccacaacgttatcagcgacggtttccccggcagcgacgtgatggagaccgccgacctggacagcgcccttgcgctgacccaggaacatgacgacctcgacctgatcctgctggacctgaacatgcccggcatgcacggcctcaacggcctgatcaacctgcgcaacgagtcgccgaccattccggtggtgatcgtctcggccgagcaggacaaacagatcgtgctgcaagctatcacctacggcgcggtgggctttatcaccaagtcatcaccgcgcctgcaaatgaccgaggcgatccagcagattctcaacggcaatgtgtacctgccgccggacatcatccgcacccagaaaaacactgggcagcggcgcatgaacgacagccctgggtttgcccccgagctgttgcaggcgctgacacgcaagcagctgctggtgttggagcggatgaccaagggtgagtcgaacaagcagatcgcctatacgctggagattgccgagaccacggtgaaggcccatgtgtcggcgattttgcgcaagttgaatgtgcataaccgcgtgcaggcgatactcagtgccggagatatcgatttcggctcgtacctgcgccgctgacggtctgacacaccacaaatcaactgtgggaggggcggtgcgacgactcgacttgcccccgatggcagagtgtcagtcggcacatgcattgactgatccaccgctatcgggggcaagccccctcccacagttgatctgcatttggtcaggtccggctgagcaggtggctcatggcggttttcagcttcatgggcctgacgggcttgtgcatcaaggtatgccccaactcacgnnnnnnnnnnnnnnnnnnnnnnnnnnnnnnnnnnnnnnnnnnnnnnnnnnnnnnnnnnnnnnnnnnnnnnnnnnnnnnnnnnnnnnnnnnnnnnnnnnnnnnnnnnnnnnnnnnnnnnnnnnnnnnnnnnnnnnnnnnnnnnnnnnnnnnnnnnnnnnnnnnnnnnnnnnnnnnnnnnnnnnnnnnnnnnnnnnnnnnnnnnnnnnnnnnnnnnnnnnnnnnnnnnnnnnnnnnnnnnnnnnnnnnnnnnnnnnnnnnnnnnnnnnnnnnnnnnnnnnnnnnnnnnnnnnnnnnnnnnnnnnnnnnnnnnnnnnnnnnnnnnnnnnnnnnnnnnnnnnnnnnnnnnnnnnnnnnnnnnnnnnnnnnnnnnnnnnccggctgagcaggtggctcatggcggttttcagcttcatgggcctgacgggcttgtgcatcaaggtatgccccaactcacggatctgctgcttcaattcattgctgtagttggcggtgatcatcaacgccggcaccgcgctcccgcgccgggcgttaatgcgggccacggcgtccacgccgttctggtcgtcgtccagatggtaatcggcaatcaacaggtccgcctcggcatggtagttgtccacctgccgcgccaggtcctgttccgacagcgccgtgatcacccggcagccccagccttcgagcaaggtacgcatacccgcgcagatcgccgcgtcgttatccagcacccacacccgggcaccttgcaggcgctcgagcaacggctcgctcatggaaggcgccggcagcgacttgggggccgtggcgctcaacggtacctccaccgagaacatcgagcctttgcccggccaggatctgacgctgatgcgatggccgagtatcccggcgatcttttccacgatggccaggcccaggcccaggccgcggtcctggtccggtcgctgcacgtcgccgcgcttgaactcctggaaaatttcctccaagcgctcttgcgcaatccccatgccgctgtcccacacctggatcaacaggcgctgctgctgacgccggcaacccagcaccacccgcccctggtaggtgtagcgaatggcattgctgagcaggttgcgcaggatccgcgccagcaactggatgtcgctgcgcaccaacgcggagcagccgacaaagtgcagcgccaagccttcggcgcgggccagttgggtgtactcggcggcgaggttgtcgagcaattcactcaaggcgaacggcgcgatatcggccttgatcacgccagcatccagtttggaaatatccaccagggtccccagcaggttttccacgtcttccagggagttgctcacattgcgcaccagggcttcgctggggcgttccagcaaggcactggtgaacagccgcgccgcattcaacggttgcaacaggtcatggctgacggcggcgagaaacttggttttcgacaggttggcctgctcggcctcgagcttggcttcgcgcaggcgggtttccatgcgccggcgctcgtcgatttccttgagcagttggtcattgagcgacgtaagctccgaggtgcgctgggccacgcgctgttccagatgctggtaggcctggtgcaaggcttcggccgtgcggcggcgttcggtgatatcgcggatcaacacgaagatccccaccacctcgccactggccagcatgttcggtacataggagcgcagcatgtagcgttcctggtggttgatgttggtttcggcgaactcaaaggtcacgctctcccccgccaaggcacgggcgacgtaggcatccaggcgctggcaatgctgctcgctgtgcacttcgcgcaggctctgcccaagcatcatgccgcgcggccagcagtaccattcttcatagaccttgttggtgaactcatagaccaggtcggcattcaagtagccgatcagcgccggcacgttgtcggtgatcaggcggatccagcgctcgctctcctgggctttctgcgccgccgcctgttcgccacgcagggtttcggcgcgcagccgggcgttgatcagcaggtggttgctggccttgagttcggccatcgcctggttcagcgcgtcggtgcgctcgcgcacttgctcggccagcaccaccgaatgctggaaggtggtgtaggggttgttgccctggggcatgccggactcgatgcgctcgatcagcgccgcattgatccgcgccagcttgtggttgtcctgttgcagccgggccagttgagcgggcaggtcagcgccggcctcgggcaatggcgaccccggtgaaggtctggttgatgtgcatgccattgaactgttctccgtaggtattgaaacccatcacccgctggtcccgcaagtaaccgccgagctgttcgagggtgccgttgtcctccagctccaggcggcgcaaaaagcaatcgcagccgatggtcagcaacaggtcgccgaggcgcgcttgcaggccgtcgaacagagcctgcaggttcggcagcagcgggccgggcgtcatcaccgtcagcacgatgccgttttccaccgcgcagtagaaactcaggctgaggtcctcatgcacctgctggatagcgcgcacgtagtactggtcgtggatacgcaccgccagcgggtgggcggcgaacgtgcggtggtcgaggtcggccaccgccacgccgatatgccgcgcgtactcttcggcggcgggctcggcgttgagctcgaacacgcggcgtgacgcgctgtcggcgccggtcaccaccagcttttccgtgcgcggcaggatatggtgggtggtgaacacctcgaaatccagccaggtgttgaccagcatcaccaccgccgcgccgctgtggaacacgccgttgaagtacacgtgggtgtgggtgaggaagttgtcgtcaccggccgaaccgccgaaatgcgggatatccccaagagccgcgctaagggcggcgaggaccatttcttcgcggctggacaggccgtcaagcagggtcagcgcaaacgtgttgcccttgatcggcgccagggtgttgctgcgacagccgccgaccagacgttcgaccatgtcctgggcaccgatcaggctgaagtgctcgacctgatcgatcagctccgtggcgatggaaaagtgcgcatggttgaagcccaccgccgtgatgcagttgcgaccgtagccttggggcgtgatctcgccggcgctggtgcagccgaccacacgcaccttgccgaagcactgttgcagggcctggccaagggcctggaggtcgtaggacgcggaacagaaaaacagcacaaaacccaggtacgggtgcagcagttgctgggccaattcctcggcggcctgcccagcatcggtggcctgggacatggcgctgactacgccttcactgttgtgcatcgttgcctccccctctgaagcatcagtgtacgaagggcctgggcgtggacctatgctacttgggtactgggtggggggattcgatgggatgggatgaggctttcaagaccactctctcaaaagccaatggagatccaatgtgggagggggcttgcccccgattgcagggtgtcagtcgatgcatgagtgattgatccaccgctatcgggggcaagccccctcccacattttgattgcatttcagatggctaccatgccattgccgtcgtccttggtcttgccgtaggacagggccaggcggttcttgccgaccttgtacgagccttgtaccaggtagccattgctgtcgacgttgcgcaacgtggcctccccggcattgttagtgaaaaacgggttgatgcccttggcctggaaccccgaaccggtcagcggcaaaccgcccatcttcgcctgcacgccgtagcccaggcccttggaggtgacggaggccacggtggaaaggcgttgatgtagccatcggtggagaaggtggtttcgtccttgtcgtacaacatgatttcggcgtcggcgaatgggctgaagcccaggccgaggataaaggcaggcaacagacgcagcggggacttgatgtcggaggcgattatcaaaaggcggtgggccatggcatacgctgccttggccctgatttgcggatgctttggaggggcagcgggtgcccggcaagttcggtttagtccaggcccggcacttaggatgtaagaccggccttgaccaacatgcccacggccaccacgacacacaggccggcaaaaccgacctgcaaggcacgcgcggggatcaccgaacacagacgccgaccggcgagcatgccgacgatactcgcggcgataaacacccaacccaccggctcgatgcgcacaccggcatgcagcgcgccggccacgccgatcaacgacagcaggctgatcaccatcagggaggtggcaacgatgccacgcatctgcacgtcggtgagctgcttgaacgctggcacgatcaggaagccgccgcccacacccagcaggccggacaccgcgccggtcaccgcgccgagggcggccagggtcgcgctgcatttggcggtccaggccaggcgcccggtctgctggtcgagcatgcagttcttctggccccaggaggcggtcccgtgatcactcggcccggcctcgcgtttttcgcgctgcaacatgcgccaggccaccagcaccatcaatgcactgaacagccccatcaacagggcttccggcaactggtgggcgaggtacacccccaccggcgaaaacagcgcgccgagcaaggcgatcagcaacgcggcgcgataacgcaccaggccatggcgcaaaccatcgaccgcccctaccgccgccgccgcgccgacggcgagcaacgacaccggcgcggcctgggtcatgctcaagcccaggcccagcaccagcgccggcaccccgaggatgccgccaccggcgccggtcaggcccatgaccaggcccatcaacaatcccaacacactggcgagcagcattcagtccaccttgctcaggcgggtcagccattcgcggcccttgagcatgccgttccagtagaaccacggcagcagagtcgccttgaggaaccacatcgagcgacgcgcctgggtcgggtccaggggaaaggtcggcagcagcttgccgccatagccgaactcggccagcaccaccttacccttctccaccgtcagcgggcaggagccgtagccgtcgtatttgagcggcaacggcgcctgtttgcgcagggccagcaggttctcggcaaccaccacgatttgcttgcgcaccgctgcggcggtcttggcgttggtggtgccgcacacgtcgcccaggccgaagatatgcgggtaacgcaggtgctgcaggctatgggggttcacttcgcaccagccggccgcgtcggccagtgggctttggcggatgaaatccggcgacacttggggtgggaccacgtgcaagaggtcgaaggctttctcttcgatgcggacgttgccctcggtgtccttcacttcgaaccaggccttgcgggctgggccgtcgactttcaccaggttggcattgaatgccaggcgggcgttgtacttttccacgtacttcatcagcggcggcacaaaggtcgccaccccgaacagcgcggcgccggccaggttgaattcgacgtcgatgtgtttcagcgtgccctgtttgagccagtgatcgcaggacaggtacatggctttttgcggcgcacccgcgcatttgatcggcatcgccggctgggtgaagatcgccttgccgcccttgagttgctgcaccaactgccaggtgtaagcagcgtgctggtaactgtagttggacgtgacgccatgtttgcccagggtgtcttgcagcccctcgaccttctcccaggccaggcgcaggccggggcagacgatcaggttgttccaggtgacgcgctggccgctgtcgagcaccagggtctgctcgtccggcagcagttcgctgacggcggcctgtacccaggtgacaccattgggcaacacgtcggccagtgggcggcgggtctttttcacgtcgtaggcaccgccgcccaccagggtccaggcgggctggtagcagtggtggtcgctcggttcgatcagggtgatatgcaggtgggggtcgcgcttgagcaggctggccagcaggccaatgcccgccgagccgccgccgatgactacgatatcgccactgatggtagggccccagtgttggtcggtcatggtctatcgcctttgtaatacatgcacacaagggtcgctgccggatggcgtcacgcccagctttttatgaccgcgccgcaatacaggccggacagggtcttcatcacttgaatcacttcatggctggccagcccgtagaaaatgtatttgccttcccgacgagtggccaccaacccctcgtcgcgcaggatgcccaactgttgtgacagcgtgggttggcgcacaccggtcagggcttccagctcgccgacattgcgctcgccctgggtcaactggcacaggatcagcaagcggtcctcattggccagggccttgagcaaggaacaggccttggacgccgatgcgcgcaactgggcaacttcgccttcactcagagtagattccatttgcctcgggtcctttgtgtcacttaagctcaaaacattatgtgaaaacgtaaactgattgtaaccacttttttcttcatcggggacgtccgccatgccagcgttgattcaagcctttctggacgaggcatcgtcgacctacacctacgtcgtctatgaaaccgacggcggcccgtgcgccattgtcgactcagtactcaactacgacccggcctcggggcgtaccgataccgcccaggccgataacgtgatcgcctttgtgcgcgagcacgctttgcaggtgcagtggctgctggaaacccacgcccacgccgaccacctgtccgccgcgccctacctgcgccgtaccctgggcggcaagatcgcgattggccagtccatcagtaaagtccagggcgtgttcaagcacctgttcaacctggagccggagttccgtgtggatggctcgcagttcgaccacctgtttgcaccgaatgaggtgtttcatatcggtaacctcaaggcccaggcactgcatgtgccagggcatacgccggcggacatggcctacctgatcgacggccgattgatcctggtgggcgacacgctgttcatgccggatgtcggtaccgcccgctgtgatttcccgggaggggatgcacggcagttgtatgcatcgatgcgcaagttgctggcctttccagtggaaaccgagttgtacgtgtgccatgactacccgcccgaaggtcgcgaggccaaatgccggaccaccgtggccgagcagcgcgcaggcaatatccatgtgcatgacggcgtggatgaagcggcgtttgtagaaatgcgcaccaagcgcgacgccgggctgggcatgccgacgctgttgctgccggcgatccaggtgaatgtgcgggcgggcaacctgccccccgccgaagataacggtgtggtgtacctgaagattccgctcaaccagctctgaatcgcgcttactcgaagtacgacgacttggagggcgcaagccccgaccacaattcgtcgatatgcttgaagccccactcctcggcgctttcacggctgatgatcttgtccggttgctcagccaggttcaccaccgactgggaaatcggcaagcgtgaacgtgccgaaaagaacaccttgaccttgggcgtcagcagcgacgtagggctttgttcgacaaccacgccaatgcgcccgctttccaggcgcaccaaggcgccgaccgggtaaatacccacgcaacggacaaacgcctggaacacccgggcatcgaagtgtcccttccattcggccattttctggatcgcctccgcgggcccccacccatgtttgtaggggcgctccgaggtgatcgcatcatagacatcgcataccgcgcccatttgcgcgaacaggctgatctggtcctgcgccaggccaaggggatagccgctgccgtcgactttttcatggtgatgcaggcacacatccagcaccagggcgctgatctgcgggcatagccgcaacatctgcgcgccttccaccggatgctgacgtacggtgcagaactccgtctcggtcagcccggccggcttgctcaagatctgctcgggaatggccattttcccaacatcatgaaacagcccggccaacccggcttcctggaccaactccggcgacaggttcaattgccgcgccagcgcgatcatcaagccactgaccgcgacagaatgcatgtaagtgtattcattagcctttttcaggcgcaccaggctgagcaaggcatggggatggcgcagcatagagcgggagatgtcctccaccaggctggccacttgacgaacctccaccgcgcgccccatgcgcaggtcactgaacatactgatcacggcacgcttggcaaccgcacacaccttcacggcacgcgccacctccgctttcatctctgagggggctggcaccacaggacgcggtgtggcaggttgtttgacggtgaccggcgccgctggggccggttgtggttcgtcgcagccttttgcggtatcgatccagacccgctggacctgcgacgtcaacaaacgctgccggtcctcttcacggtccaacaaaaagctgctcttccagaacccatggccgatccatggcccgtccagtttgtgcaggtacatccccaggatcacctgggaacaagcaatgcacttcagcatgtatcatcccccccaaggcatgacctgcttggcgatcaactcactgcaaacttcgccacgatctgtttcaagtccacggcgagcctggacagttcctggctggccaccgatgtctgaccggcggccgacgaactctggatggacaggtcgcggatgctgatcaggttctggtcgacggaacgcgccacctgcgcctgttcttccgacgcggttgcaatcatcaggttacgctcattgatgtcggtaatggcttgggtgatctgggtgatcgccacgccggcttcatgggcaaccttcaacgagtccaccgcttcattgcgattgaggaccatggaggccaccgcttcgctcgaacagctctggattttcgcaatcatctgttcgatttcctgggtcgatgtttgcgtcctgtgggccagcgcccgcacttcatcggcgaccaccgcaaagcctcggccctgttctcccgccctcgccgcttcaatcgctgcgttcaacgcaagcagattggtctgctcggcgatggagcgaatcacctcgaccacccgggcgatgtcctgggcctgtttggccagcccttcaacttccaccccggtttgctgcaccgtggagctcaacttttcaatcgaagcgatggtttgcgtcacccgctccatccccacgcttgccgaacgctgggagtcctgcgtcgactgggacgcagacaccgcattccttgccacctcctcgaccgctgccgtcatctggttgaccgccgtggcggcctgatccgtctccaggctttggcgctcaatgccggcagtggactcccgggtgatcgcactcatctcctcggctgccgacgccaactgcccggacgcctccgagatatgctgcaacgtgcttttcaggttcatctgcatggtagcggtcgatttttgcagctcggtcagttcgtcattgccgctgatggtaatggccacacgcaaatcgccgtcggcaatcttgccggtcgacaccagcagctcccgcaccggattgataatgctgcgggtcagcaagcgggccaccaccacggcgatcaacaccgaactgaccatcaacacccatgtgaacaaccgcgccgcatcatgctcactggcggcggcttgcaccgcggtcttcgagccctgttcattgatcgcaatcaaatcgctgatggaggcctgcacttggcgagcaatggggccgttgacgtcgcgcaaatacaccgccatttgttccgcggaaaagctggaggcttgcgcgaggaattcatccatcttctggctgtagttttttatctcactcagtgcctggtcgtacttggtacgctcctcggggctcgataccagcgttccataatgctcggcaacttgcagcacttcggcgcgaaccgccttgagtttttccagggaggcagggtccttgtccgcgtattccatggcgtaacgccgcaggtccaggcgaagtttgtaaaacgtcgaatctatctggccggccaggcgaatactgggcagccaattgttttctatttcgaccgtcgatgaataaaccttatcgacttttatcagcgtcatcgcaccttgtattaacagcaggaaacacaccacaccgaagcacaatgtggtacgaaagttcaacttcaaggctctcatggacatctcggctcacccttccccttggccgtgctgtacacggccttacgggtacaactttgtttaaccgagtgtgaaaaaaacgtgactacttacgcatttttttatgaatagtggcaaataaacatgacgcagatcattgcttagctaaccatcataattaacggctgttgcgactctccgacattcataccattagtccatcccgtggtaacggcagcgctgttttatatcgaacttgtttaagtgcaaaactggaccggatattggcgacgcctggcaccttggtcaaaaaatccatcatgaaacgctccagcgactggatcgtcggcaccaatacccggataaggtagtccgggtcgccggccatcaggtagcactccatcacttccgggcggtccgcaatcgccccttcgaactgctgcaacgccagctcgttctgcttttccaggctcacgtggatgaacacattgacgtgcaaccccagcaggtcggcgtccagcagcgtgacctggtcgcgaatcaagcccagttcttccatcgccttgacccggttgaaacacggcgtgggcgacaggttgaccgagcgggccaggtcggcgttggtgatccgtgcattctcctgcagggcgttgagaatgccgatatcggtacggtccagtttgcgcatgagacaaaatcacctgtttattatgtttatgcagtttttttatccgcaaatgatcctgagcgcaacgaaacagagataaatattcttctacgccacgcctatgattgttgtaggacaagatttcccctacccggggactgactgtcagctagcgcgcccactacaagaaattcacaagatagagcgtagaaagccatgacccagcagtatgaaccactgcgcctgcacgtccctgaaccctcgggccgcccaggctgcaagaccgacttcacctacctgcgcctgaccgacgcaggcaccgtgcgcaaacccgccatcgacgtagaacccgccgacaccgccgacctggccaagggcctgatccgcgtgctcgacgaccagggccaggccctcggcccgtgggctgaaggcatcccggtggagatcctgcgcaaaggcatgcgcgccatgctcaagacgcggatcttcgacaaccgcatggtggtcgcccagcgtcagaaaaaaatgtcgttctacatgcagagccttggcgaagaagccatcggcagcgcccaggccctggccttgaacatcgacgacatgtgcttccccacctaccgccagcaaagcatcctgatggctcgcgaagtgccactggtggacctgatctgccagttgctgtccaacgagcgcgacccgctcaagggccgccagttgccgatcatgtattcggtcaaggacgccggcttcttcaccatatccggcaacctcgccacccaattcgtacaaggcgtgggctggggcatggcctcggcgatcaagggcgataccaagatcgcctccgcctggatcggtgacggcgccaccgccgaatccgacttccacaccgccctcaccttcgcccatgtgtaccgtgcgccagtgatcctcaacgtagtcaacaaccagtgggccatctccaccttccaggcgattgccggtggtgaagcaacgaccttcgccggacgcggcgtcggttgcggcatcgcctctctgcgcgtggacggcaacgacttcatcgcggtgtacgctgcttccgcctgggctgccgagcgtgcgcgccgcaacctcgggcccacgctgatcgagtgggtcacctaccgcgccggtccgcattccacatctgatgatccttccaaataccgccccgccgacgactggagccacttccccctgggcgacccgatcgcccgcctcaagcagcacctgatcaggattggccagtggtccgaagaggagcatgcggcggtcagtgcagaacttgaagccgaagtgattgccgcgcaaaaacaggccgaacagtacggcaccctggccggcggccagattccaagcgccgcgaccatgttcgaggacgtctataaagagatgccggagcacttgaagcgccagcgtcaagagttgggggtctgacatgaacgatcacaacaacagcattgaagtggaaaccgccatgaccaccaccaccatgaccatgatccaggccctgcgctcggccatggatgtgatgctcgaacgagacgacaacgtggtggtgttcggccaggacgtcggctatttcggcggcgtgttccgttgcaccgaaggcttgcagaccaagtacggcagctcgcgggtgtttgacgcgccgatctcggaaagcggcattatcggcgtggccgtgggcatgggcgcctatggcctgcgcccggttgccgaaatccagttcgccgactacgtctaccccgccaccgaccagatcatctcggaagctgcgcgcctgcggtatcgctcggccgggcagttcaccgcaccgctgaccatgcgtatgccctgcggcggtggcatctacggaggccagacccacagccagagcatcgaagcggtgttcacccaggtctgcggcctgcgcacggtgatgccgtccaacccctatgacgccaagggcctgctgatcgcctccatcgaaaacgatgacccggtgatattcctcgagcccaagcgcctgtacaacggcccgttcgacggccaccacgaccgcccggtaacgccgtggtcgaaacacccgcaagcccaggtgccggacggttactacaccgtgccgctggacgtggccgccatcgtgcgtccgggctcggccgtgaccgtgctgacctacggcaccacggtgtatgtgtcgcaagtcgccgccgaggaaaccggtatcgacgccgaagtcatcgacctgcgcagcctgtggccgctggacctggacaccatcgtcaaatcggtgaagaagaccggccgttgcgtggtggtacacgaagccacccgcacctgcggctttggtgccgagctggtgtcgctggtgcaagagcattgcttccaccacctggaagcgccgatcgaacgcgtcaccggatgggacaccccctacccgcacgcgcaggagtgggcgtatttcccagggccgtcccgcgtgggcgcggcgttgcaacgggtcatggaggtctgaatgggcacgcacgttatcaagatgccggacattggcgaaggcatcgcggaagttgaactgtcggtgtggcatgtgaaggtcggcgacatggtcgtcgaagaccaggtgctggcggatgtcatgaccgacaaggcgatggtggacattccctcgccggtgcacggcaaggtgctctccctcggcggcgagccgggtgaagtcatggccgtgggcagtattctgatcagcattgaagtggaaggcgcgggcaacgccaaggatgcgccgctcgtcaaagaggcgccgaaagtcgccccggtggtggaagccaagccggtgccggcggttgtcgagagcaaacccgcgccggttgtcgcggcgcaggcgcctgtggcacgtgccgccgacgaacgcccattggcctcccctgccgtgcgcaagcacgccctggacgccgggattcagctgcgtctggtgcagggctcgggcccggcgggccgaatcctccacgaagacctcgacgcctacttgcaacaaggcacagcgaaggcttcatccaccgccaacccctacgccgaacgcaacaccgaagaacagatccccgtgatcggcatgcgccgcaagatcgcccagcgcatgcaggacgccacccggcgtgccgcgcatttcagctacgtagaagaaatcgacgtcaccgctctcgatgagttgcgcgtgcacttgaatgaaaagcacggtgccacacgcggcaagctgaccctgctgccgttcatcgtgcgcgccatggtcgtggcgttgcgcgacttcccgcagatcaatgcgcgttacgacgacgaagcccaggtcatcacccgcctcggcgcggtgcatgtgggcgtcgccacccagagcgatgtcggcctgatggtgccggtggtgcgccacgccgaggcccgcagcctgtggggcaatgccgaggaaatcgcacgcctggccacggccgcgcgcaatggcaaggccagccgtgatgagctgtcgggttcgacgattaccttgaccagcctgggcgcgttgggcggcattgtcagcacgccggtgctgaacctgccggaagtggcgatcgtcggcgtcaatcgcattgtcgagcggccgatggtgatcaagggccagatcgtggtgcgcaagatgatgaacctctccagctccttcgatcaccgcgtggtcgatggcatggacgcggcgcaattcatccaggccattcgcggcctgctcgaacaacccgccagcctgttcctggagtaaggcatgacgcagacattgaataccaccctgctgattatcggtggcggccctggcggttatgtggcggcgatccgtgccggccaactgggtatcccgaccatcttggtggaaggccaggcgctgggcggtacttgcctgaatatcggctgcattccgtccaaggccctgatccatgtggccgagcagttccagcaaaccgtgcaccacagccagggttcacagctgggcatcgaagtggatgtgccgaccctggacatccgcaaaagcgtggaatggaaagacggcatcgtcgaccgcctgaccaccggcgtcgcggcgctgctgaaaaagcacaaggtgcaggtgatccacggctgggccaaggtggtagacggcaagaccgtcgacgtcggcgaccagcgcatccagtgcgaacacctgctgctggccaccggctcgaaaagcgtcaacctgccgatgctgccgattggcgggccgatcatctcctcgaccgaagcccttgcaccgaaaagcgtgcccaagcgcctgatcgtggtgggcggcggttacatcggtttggaactgggcatcgcttaccgcaagctcggcgccgacgtgagtgtggtcgaagcacaggatcgcatcctgccggcctatgatgccgagctgacgcagccggtgaacgaatctctcaggcaactgggcgtgaagctttacctcaagcacagtgttaccggttttgccgatggcagcctgcaagtgcgcgacccgaacggcgacaccttgtcgttggccactgatcaggtgctggttgccgtcggtcgcaaacccaacacccagggctggaacctcgaagcgctgaacctggatatgaacggcgcggcgatcaagatcgacaaccgctgccagaccagtatgcgcaacgtgtgggccatcggtgacctgagcggcgagccgatgctggcgcaccgggccatggcccagggcgagatggtcgccgaactgatcagcggcaagcaccgcgaattcaacccggcggccatcccggcggtgtgctttaccgacccggaactggtggtggtcggcaagacgcccgacgaagccaaggccgccggcctggactgcatcgtgtcgagcttcccgttcgcggccaatggtcgggccatgaccctggagtcgaaaaccggcttcgtgcgggtggtggcacgccgtgacaaccacctgatcgtcggctggcaagccgtgggggttggcgtctcggaactctccaccgcctttggcctgagcctggaaatgggttcgcgcctggaagacgtcgcgggcaccatccacgcccacccgaccctcggcgaagccgtacaggaagccgcgttgcgggcgttggggcacgcactgcatctgtaaaaccgcggtgaggccatcgggggcaagccccctcccacaggggaatgcattcaaattgtgggagggggcttgcccccgatagcggtggatcggtcaaaccagaggctgaaggcgtccacccagtggctcccacacaagccaagaatgcagtattgttgcgcccatccagaaaaaaaccgacttgaccaacgatagagggtgtcatgggtaacgaaagcatcaattgggacaagctgggttttgactacatcaagaccgacaagcggtttctccaggtctggaaaaacggcgaatggcaagaaggcaccctgaccgacgacaacgtgctgcacatcagcgagggctccaccgccctgcactatggccagcagtgcttcgaaggcctcaaggcctaccgctgcaaggacggttcgatcaacctgttccgcccggaccagaatgccgcccgcatgcagcgcagctgcgcacgcctgctgatgccgcacgtgtcgaccgaagacttcatcgatgcctgcaaacaagtggtcgcggccaacgagcgcttcatcccgccgtacggcagtggcggcgcgctgtacctgcgcccgttcgtgatcggcaccggtgacaacatcggcgtgcgcaccgcgccggagttcatcttctcggtgttctgcatcccggtcggcgcctacttcaagggcggcctggtgccccataacttccagatctccaccttcgaccgcgccgccccacagggcaccggtgccgccaaggtcggtggcaactacgccgccagcctgatgccgggttcggaagcgaagaaatccggtttcgccgacgcgatctacctggacccgatgacccactcgaaaatcgaggaagtcggttcggccaacttcttcgggatcacccacgacaataagttcatcacaccgaagtcgccttcggtgctgccaggcattacccgcctgtcgctgatcgaactggccaagacccgcctgggcctggacgtgatcgagggcgaagtgttcatcgataagctggaccagttcaaggaagccggcgcctgcggtacggcggcggtgatctcgccgatcggcggtatccagtacaacggcaagctgcacgtattccacagcgaaactgaagtcggcccgatcacccagaagctctataaagagctgaccggtgtgcagaccggcgacgttgaagcgccgcaaggctggatcgtcaaggtctgagccacctggaaaaacccgccatctggcgggttttttcattgttcggggatattcaccactagcttcttgcccatgctgatcctgggttccaccccataccccaatgcctcgtagaacccgacgaccccctcattaccactggtgatctgcaggttgatcttcatgcagcccagcgccgtcaatgcctgttccgcatgccgcaccagcgacgaacccaggccatggcgccggtagtccgcatgcaccgccactgaatacagccagccacggtgcccgtcatacccggccagaatcgtcccgatcacggtttttttgtccgtcgcgacgaagaacaaaccatcgttgaccgccagcttcttatcaatcgccagggcgggcaggttgtgcgccgtttcgtagccaaacgcctcttgccacaacgccactacctgcgcccggtgctgacggtcgcgatacggcccgatgggatgccgggacagcagggccttttccatcaccaacgtacgttcgctgccgtgataaacgtcgcgcacggtgtgaaaccccagcttggtgtagaacggctcggcggtcagcgaagacggcacgctcagcaccgtcaccccgtcttcgcgggcgcgtagctcgatttcgatcatcaacagccgaccaatgccctgcccttgcaactccggattgacgaacaccgagcgcaccacattcgcatccagcgctgcggtggcgacgatcacctgatcctgaatcgctaccagcaccacgcggcgcttgagcaacgccagcactgcctccggtgtgaagttgctggcgacccgcgcaatcacctccgtcggataatcccgcgcattgctgctgtgcagggccgcgaggatgacctggctgatcccttcggcatcggcttcctgggcgagacgaacggcggtagacatgattcctcctggctgacacagctgcaacaaacaccatcctaccaatgtgggagggggcttgcccccgatagcatgctttcagatatagattttctggctgacccaccgctgtcgcgggcaagccccctcccacaggttgcatgcatttcactccggcagccgattcggctgccctacccaacttttcagctttcccggctgaaccacccctcggtttcagccgggattcaccccgcacaacccacaaaatagccccacagctcaccccatggatttcgtgcccccatgcaaaccaccaacaccgtcttgatgattcgcccggcgcgctttgccttcaacccggacaccgcaatcaacaaccgtttccaacgccagcctctcgacccactccacgcacagcagaaagcgctggaagagttcgacggctatgtcgccaccctgcgcaatcacggcgtcgaagtgctggtggtgcaggacaccccggcgccccacacccctgactcgatcttccccaacaactggtggagcagccacgccgacggcagcctggtgctgtacccgatggaaggccagaaccgacgactggaacgcgacaaaggcgtgctgcaagtactggagcaacgttttgcgatcaacagcaccatcgacctcagccacctcgaacaacagaacatcttcctcgaaggcaccggcagcatggtgctcgaccgccagcaccgcatcagctacgcctgccactccgggcgcacccaccacgacgccctgcgtcagttcgccgagcgcctcgactaccagctttgcgtgttccacgcggtcgaccgccaccacgcgccgatctaccacagcaacgtgatgatgagcgtcggccgcaacctctcggtggtgtgcctgcaagccctgccgattgccaatgagcgccaggccctggagcgctccctgcgcgacaccggtaaggacatcgtcgccctcgacttcgaccagttggaagccttcgccggcaacatgctcgaagtccacgaccgcgacggccagccgctgctggtgatgtcggccagcgcctggggcgctctgcaaccggcgcagcgccaacatatcgagcgccacacccggccggtggtggtgaacatcgacaacatcgaacgcatcggcggcggcagtgcccgctgcatgctggcggaagtgcatctgcccgcccgtccctcatttcaataaggagtcttgccatgacccgctatatcgacgtcaacgacctctgctacctggtctcgcaaaaaggcctgtccacctgcatcaccgaaatggccgagtacatccgcgccgactacctgcgctggcaagatttcgaaaaatgcgcgcgcctggccaaccactcgccggacggcgtgatcgagctgatgccggtgtccgatgcgtcgctgtatgcgttcaagtacgtcaacggccacccgaaaaacaccctggcaggcatgctcaccgtaatggccttcggcgcgctgggcgatgtcgacaccggcctgccggtgctgctggcggaaatgaccctgaccaccgcgatccgtaccgccgccacctcggcgctggtcgcccgctacctggcccgcgagaacagccgcagcatggcgctgatcggcaacggttcgcagagcgaattccaggccctggccttccacgccatgcttggcatcaatgaaatccgcctgttcgatatcgacgccaaggccactgccaaactggccgccaacctcaaggccttcccggcgatcaaagtgatcctggccggcagcgtggctgaagcggtcaaaggcgccgacatcgtcaccaccgtcaccgccgacaaggcctacgcgacgatcctcaccgacgacatgatcgaacccggcatgcacctcaatgccgtcggcggtgactgcccaggcaagaccgagctggaccgacgtatcgtcgagcgcgcccgggtgatcgtcgagtacgaaccacaaagccgcatcgaaggcgaaatccagcacatgccggaagattcgccggtcacagagctgtggcaagtgatcaacggccagcagccaggccgcgagaatgcgcgccaggtcacgctgttcgactcggtgggttttgccattgaagactactcggccctgcgctacgtactcgacgtcgccaaggcgctggatgtgggcagcacacttgaactggtgccggacctagccgaccccaaagacctgttcgcacgcctggcccaacagccccgcgtacagcagaaaaagcgcgcctgagaccgctctggcctgctgctttgcgtcgagggcgggccattttttcagggaggaaaagccgattcagcgggtgtcacagccgattccgctgcattgccagttttaacagcgcaatttgcgctttatgcgaggggtaaacgacacaaaaaacgcaccatcatgaagcattctctgctcccagttattcactgccctgacatcaattacaaaatatagggacctgcacatgactccattgcgatcactcttcgccgcgctgctgttgccactctgcgccacctccgcccacgcccaggactggaaagaaatccgtttcggcgtgttccccgaatacccgcccttcgaatccgtggccgccgacggcagcctgcaaggtttcgatatcgagctgggcaacgcgatctgcgccaagctcgaagtgaaatgcacctgggtccacaatgaattcgacggcatgatcccggccctgcgcgcgcgcaagttcgacgcgatcatgtcgtccatggccgtcaccccggcccgtgaaaaaatcatcgacttcagtgaccggctgttcctcagcccgacctcggtgatcacccgcaagagcgccgacttcggcgacaccccggaatccctcaagggcaagcaagtcggcgtactgcaagggtcgttgcaggaggcctatgcccgtgcgcacctggccaagctcggcgcgcagatcaaggcgtaccagtcccaggaccagaactacgccgacctgcagaacggccgcctcgacgcgaccctgaccgacaagctcgaagcccagctcaacttcctgtccaagcccgaaggcgccgacttcaagaccggcccggccttcaaggacccgaccctgcccctggacatcgccatgggcctgcgcaagaacgaccaggaattgcgcgcgctgatcaacaagggcatcgctgcggtgcaggcggatggcacttacgcgcagatccagaagaaatactttggtgatcaggacatctaccacgagtgatgctctgacctcgctgtggaaacttgcttgtgtgggagggggcttgcccccgatagcggtggttcagtcaactgatttggcactgatacacctctatcgggggcaagccccctcccacaaaaggcagcgtccacagtcaatctctgtgctccatcgagatcatttccatgaatgaattcctcaacttgcaaggctacggcccgatgctcgcccagggtgcgtggatgacgctcaagctgtccttcctcgccctggccttgagcctcgccctcggcctgatcgccgccggcgccaagctctccagcgccaaatggctgcgggtgccggccacgctctacaccacgctgatccgcagcgtgccggacctggtgctgatcctgctgattttctacagcctgcaactgtggctcaacgacctgagcgaactgttcggctgggactactttgaaatcgacccgtttaccgcaggcgtcgtcacgctgggcttcatctacggtgcgtatttcaccgagaacttccggggcgcgatcctcagcgtgccggtcggccaactggaagcggcgaccgcctatgggcttagccgctggcagcgctttcacctggtgctgttcccgcagctgatgcgttttgccctgccgggcctgggcaataactggctggtgctgctcaagtccacggcgctagtgtcgatcatcggcctgtcggacctggtcaaggccgcgcagaacgccggcaagaccaccaacgagccgctgtacttcctgatcctcgcgggcctggtgtacctgatgatcaccaccctctccaaccgcatcttcaagcgcctcgaacggcgctacaacctcggcatcaaggggatggcgcgatgatcgaactgttccagcaatacggcctggcctacctgctcagcgatggcgcggggctgtccggcgtggccatgaccctgtggctgttcatcgtctcggtggtgttcggcttcgtgctgtcgattccgctggcgctggcgcgggtttccgagcacttctggctgcgctggccggtggaggtctacacctacctgttccgtgggacgccgctgtatatccagttgctgatctgctacaccgggctgtacagcctggaagtggtacaggacaacgccctgctcaaccagtttttccgcaacgcgctgaactgcaccctgctggccttcgtgctcaacacctgcgcctacaccgtggaaatcttcgccggggcgatccgcaatattccccacggcgaaatcgaagcggcccgcgcctatggcctgcatggctggcggttgaacctgtttgtggtagtgccggcagctctgcgtcgcgcattaccggcctacagcaatgaaatgatcctgatgctgcacgccacctccctggcgtttaccgctaccgtcgccgacatcctcaaggtggcccgcgacgccaatgccgagacgttcctgacgttccaggccttcggcatcgccgccctgctctacatgctgctgtcctttgcactggtgggcctgttccgactggccgaacgtcgctggatgcgttttcttgttcctacccgaggctaacccatgaatcagtccgcgcaggccctggccacttatcccgttgacgaacccgtagccaaacccgccaccgctgccatcaagctgcaagtcgaaggcatccacaaacgctacggcgaacacgaagtgctcaagggcgtatcgctgaatgcgcgcaatggcgatgtgatcagcctcattggcgccagcggctccggcaaaagcacgatgctgcgctgcatcaacttcctcgaacagccagacgccggggtgatcaccctggatggcatcagcctcgaaatgcagccaggccgcgccggcacccgcgcgccgcaccaggcccagttgcagaacctgcgcacacgcctggccatggtgttccagcacttcaacctgtggagccacatgaccgtgctggaaaacatcaccatggccccgcgacgggtgctgaacgtgagcgccgccgaggcggaaaaacgcgcgcgcctgtacctggacaaggtcggcctgccgggccgcgtggcggatcagtacccggcgttcctgtccggcggccagcagcagcgcgtggccatcgcccgagccttggcgatggaaccggagatcatcctgttcgatgaaccgacttccgcactcgacccagaacttgtaggagaagtcctcaaagtcatacagacgttggccgaggaaggtcgtaccatgctgatggtcacccacgaaatgggctttgcccgccaggtgtccagccaagtgctgttcttgcatcagggcaaggttgaggaacaaggcgatgccaggatcctcgaccaccccggcagtgagcgcctgcaacaatttctttccaaccgtttgaagtgaaccccatggataccaaggccaacggaccccattcctcccctgcgctggaccgcatcgatgaggccatcatcgaagtgctgcgccatcaggggcgcatcacctacgaaaaactctcgtcgctggtgcacctcacgcccaggccttgcctggaacgggtgcgcaagctggagcggcgtggggtgatccgtgggtatggggcgatcatcgatgtgcagatggtctcgccaggcttgtcattgctggtcctggtggccttgtccaaccaaagcgggcgctcggcgcaaaaggccttcgaagcctgtgtgaaagcctgcccgcaggtgttcgaatgccagctgatcagcgggccgttcgactacagcctgcgcatgcgttgccgggacatggagcactatcgagtgctgacagaaacctggttgaacaatgacgagctgcacatcgataagttggtggcgcatccggagttggcggtggtcaagaacaccgccaccgagctggcctgaacttatcgctccaaaacaccgcaaatctaatgtgggaggggcggtgcgacgattcgacttgcccccgatgagggagtgtcagttaaaaatgtatagactgacacactgctatcgggggcaagccccctcccacatattcaaccctgcccgcttaagatttttttgccaggcttggtgccgatcagcctggcctgcccatccttctgcttccccgtccgcgcctcgctgatcaaccccggtatcaacttgccctccggcaggttcttccagaaccggctgggcaagtgcccttccatcaccttggggttcaaccgcgccgggttgaagatgtggctgtaataggtcagccacatcgcattgtgggggtcctcgacattctgcgccaactgccgccacgcctcggggcattcacgctggtggatcaactgctcgccgtcgtagtagaccccatccagcggcgtggcgatcatccagcgatggcggcccatgcgcccgataaagtgctggctggctgatttcaggatgtcatgggctggctcgtgccaggccacgtattccggcagttccggccccgctcccgccggcagcgcgataaaccgcacaaacgcatgcaggtggtgcgcctcgcggctgacctgcttgatccgccgctgcaactcactgcccagcttgtccccggccagcatcgcggtgcggtcgccatggctgacgcgccataacacttcgtacaacaagctccaacgctggtcgccgtgatagcaggcagccgactccagcagttccaacaacgctttggggatccgcgcctggaacggccccaggccctcagggatcggctcatcggtggcaaacaggtccgccacctccgcctcgccccagctcacctggctggggtcgacctgatggctgagcagccagcgcgcctgatcgcgccaggtggcgaacaggttgtcgcattccaggctgatcacccccacaaccccatctgctgcggttgcgggcgatcacgcagttgttcgcgcagcaatacgctggtgctgtcggcctgttgcgggtggtagtcgctggtgatgaaaaacggcttggccttggccagtacgcagcgcatgcgcgccaggtcttcgaagcggatcttgcgttcgcggcgcaggtccaccaggcgctgggtggtgcgcaggccaatgcctggaatgcgtgcaatcaaggtcggttcggcgcggttcaggtccagggggaacacgtcgcgattgtccagggcccaggccagcttggggtcgatgtccagggccaggtggccagggcctttgaacagttcattggcattgaacccatagctgcgcaacaggaagtcggcctggtacaagcggtgctcgcgcatcagcggcggcgcggccagcggcacgcttttcgggctgttgggaatggggctgaacgccgagtaatacacgcgacgcagcttgaagttgccgtacaacgcctcggcaccgtggaggatggtgctgtcatctgtgtcgtcggcgccgacgatcagttgcgtgctctgcccggccggcgcaaaacgcggtgcacgcggttcgttgcgcacggtctgctcgccggtgtagatggtctgcatggcctgcttgatcgagacgatctttttttccggcgccagggtctgcaagctggcctcggtgggcagttcgatgttcacgctcagccggtcggcatagcgcccggcctcggcgatcagcgccgggtccgcgtcgggaatggtcttgaggtggatatagccgcgaaagtcgtgctcttcgcgcagcagcttggccacgcgcaccaactgctccatggtgtagtcggacgaacggatgatgccggagctgagaaacagcccgctgacgcaattgcgccggtagaaatccagggtcagagtgaccacctcctccgggctgaaacgcgcacggggcacgtcgctggagcggcggttgacgcagtactggcagtcgtagagacagaagttggtgagcagcaccttgagcaacgacacgcaacgcccgtcgggcgtgtagctgtggcagatgcccatgccatcggtggaacccagccccgccttgccctcggagctgcgcttgggcgcgccactgctggcgcacgatgcatcgtacttggcggcgtcggcgagaatgctgagtttttcgatcaactgcatggagggctaccgatactggttttttgtacagtatcagccaaccctccgggtcacaagtgcagcctgtcagcttgccgtggcgagcaacaggtcctgcaccgagcgccccttgccgcgcccacggtccagggcatacaacgacgctgcaatctcatcggcgcgaatcggcagcaccgacagcaaggtgtcgctcaagccatggctggcctggctgaaaccctggatgtagatgccggcgttgcagcgctcgtcggtgacgatgcggtagtcgcgtgccacttcgaagtcgcccaggtagtcttccaacggcgccagcaaggcgcggtgtgtctggcgctcgtagccggtggccaggatcaccgcgtcgtaatggttgacgctggtgtcgccgttggcgttgttgcgcagcgccagttcgatacccagcgggccgggggtggccttctcgaccacggtcatggtgcggaacgcctggcgggcgatgccggagactttctggcggtagaaaatgccgtagatgcgctcgatcaggtcgaggtccaccaccgaatagttggtgttctggtactcggccaccaggcgctcacgctcggcgccctcctgctggaacaccaggtcggtgaaggccggcgagaacacttcgttgacgaacgggctgtcatcggcgggcttgagcgccgagccgcgcaggatcatgtcgacctgcaccgacgggaagctgtcgttcaggtcgataaaggcttcggccgcactctggccgccgccgatgatggcgatgcgcatggccttgccgtcgacacacggctgggtggccatgcgctccaggtattgcgaatggtggaacacccggctgtcgcctttaagcgccttgaacgcctcgggaatacgtggcgtgccaccggcgctgaccaccaccgaacgggtggtgcgcacatgctgctcgcccagggcatcgcgggagatcacgcgcagcgcttcgacctgctgctgatgcaggatcggctcgatggccagcacctcctcgccgtagcgcgcctgggcctggaactgcccggcgacccagcgcaggtagtcgttgtactccatgcggcacgggtagaaggtgcccaggttgataaagtccaccaggcggtcgtgggctttcaggtagttgacgaaggagtacgggctggtggggttgcgcagggtcaccaggtccttgaggaacgagatctgcagctcgctctgggttaccagggtattgccgtgccagcggtagtcggcctgtttgtccaagaacagcacgtccagtttgccctgggccttttcgcgctcctgcagggcgatggccagcgccaggttcgaagggccgaaaccgataccgatcaggtcgtgaaccgcgggcgaagcaattgcctgtgtcattccagtgtcctctggataagccccttggcggtggggcgggaatacctttcaaggcctgaacaacaggccgtgtgttgataggaaacgaggacagtgaaataaaatttaaccgatcattgatcagtgtgcttcccactcgcgcatccgtacccggcagtgcttcatggcgttgacgatgtgtttttccaccagggcgcgggaaatgcacaggcgttcggcaatctgcaagtgggtcaggccgtcgagcttacgcagcaggaagctgtcgcggcaggccggcggcagttcggccagggcgcgttcaagcagctccaggcgctggccgtgggcgtgggtggtgtgcggcgaactgctggcaaagcgttcttcggcatcgagtacgtccagcggttcgacctggcgcaaggcgttgcgccgatggccgtcaatcaccaggttgagcgcagtacggtacaaaaaggcacggggttgctcgatgggggtgtcgctggaacgttccagcacccggacatacgcgtcatgcaccacatcctcggcgacctgacggttgcccagcttggcgttgaggaaacacaccagctcgcgatagtagttttccaacatgactcccggccgcggggtagcggcattaggtccccgggtgcaaaaaagacagcgttaaggtaatggcagtttgagtgcgtgcaatttatagtaattctcatctacttttaaagcagacttgcatcaacggacgatttttttcttcaagggagctgtaactgcttatgtaaccgcctaaatccccgcgcaattctctcgtttacttgtcagctccccgcaactgcggtccgaactttcctggctggaaacccacgcatgaaacgccctcgacctgcccgacgcgccttgctcgttatcgcgtgcctgatccccatcatcgccgtcgcggcctggcaggtgctgccgccggggcgtgacaccctcaccaccgtcaccgtcacccgcggcaatatcgaaaacagtgtgaccgccctgggcaccctgcaaccgcgccgttatgtggacgtgggcgcccaggcatccggccagatccgcaagatccacgtcgaggccggcgaccaggtgcaggaaggccagttgctggtggagatcgacccgtccacgcagaaggccaagctcgacgccagccgctacgccatcgagaacctcaaggcccagttgcaggagcaaaaggcccagcacgaactggcgcgccagaaataccagcgccagcagcgcctggtcgccggcaacgccacccgcgaggaagacgtgcaaaccgccaaggcggaactgagcgccacccaggcgcgggtcgacatgttccaggcgcagatcctgcaagcccaggccagcctgcgcagtgatgaagccgagctcggctacacgcggatttatgcgccgatgaccggcaccgtggtcgcggtggacgcccgcgtcggccagaccctcaacgcccagcagcagacgccgttgatcctgcggatcgccaaattgtcgccgatgaccgtgtgggcggaagtctcggaagccgatatcggccacgtcaaaccgggcatgaccgcctacttcaccaccctgagcggcggtaaccggcgctggaccagcaccgtgcggcagatcctgccgatcccgcccaagcctctgaatcagactcaaggcagcggcagccccaacagcacgaataaaagcggcagcggccgcgtggtgctgtacaccgtgttgctggatgtggacaacggcgacaacgcgttgatggccgaaatgaccacccaggtatttttcgtcgccagccaggccaaggacacgctgacggcaccggtcgctgcgctgcagggcacgacgaacgccaaccagcagatcgcccgggtggtggccaagaatggccgcatcgaacagcgccaggtgcaggtcggcatcagcgaccgcctgcgcgtgcaagtgctcgacggcctgaacgaaggtgatcacctgctggtcggcccggccgacggcaacgggggttgaggtgaacacgcccctgatcgaactcaaggacatccgcaagtcctacggcggcggcgacagcccgcaggtcgacgtattgcgcggcatcgacctggcgatccatgccggggaattcgtcgccatcgtcggcgcttccggctccggcaagtccacgttgatgaacatcctcggttgcctcgaccgccccagcaccggcgactacctgttcgccggggaaaacgtcgcgcacctggacagcgacgaactcgcctggctgcgccgtgaagcctttggctttgtgttccagggctaccacctgatcccctcgggttcggcccaggaaaacgtcgagatgccggcgatctacgccggcatcagcgccgccgagcgccatgcccgcgccaacgccctgctcacccgcttgggcctggccgagcgcaccggcaaccgtccgcaccagctttccggcggccagcagcaacgggtgtccatcgcccgtgcgttgatgaacggcggccatatcatcctcgccgacgaacccaccggcgccctcgacagtcatagcggcgccgaggtcatgaccctgctcgacgaactcgccagccagggccacgtggtgatcctgatcacccacgaccgcgaagtggcggcgcgggccaaccgcatcatcgagattcgcgatggcctgatcatcagcgactcggccaatgacagcgacgcgaaacccgtggccaccagcggcgccctgcaagccgtggacctgcgccagcgcctggccgacggcgccgagcacaacggcgcctggaaagccgaactgatggacgcggtacaggccgcctggcgtgtgatgtggatcaaccgcttccgcaccgcgctgaccctgctgggcatcatcatcggcgtggcgtcggtggtggtgatgctggcagtgggcgaaggcagcaagcgccaggtcatggcgcagatgggcgcgttcggctccaacatcatctacctcagcggttcgtcgccgaatccgcgcacgccgctgggcatcgtgaccctcgatgacgtgcatgcactggcgtccctgccgcaggtgcagcgcatcatgccggtcaatggcaacgaagccggggtgcgttttggcaatgtcgactacatggcctacgtgggcggcaatgacaccaacttcccggagattttcaattggccggtggtcgagggcaattacttcactgctgccgacgaacgtgcggctgccaccgtggcggtgattggacatcgcgtgcgcgagaagctgttcaagggtgaggtcgaccccatcggccagtacatcctgattgaaaatgtgccgttccaggtgattggcgtgctggcggaaaaaggcgccagctccggcaacaaggacagtgacgaccgggttgccatcccttacaccgccgccagcgtgcgtctgttcggcagctacgaccccgagtatgtggtgatcgcggcggcggatgcgcgcaaggtccgcgaggccgaagtggccatcgaccagttgatgcaaaagctgcacaacggcaagcgcgactatgagctgaccaacaacgccgcgatgatccaggccgaggcgcgcacgcagaacaccctgtcgctgatgctcggttcgattgccgcgatttccctgttggtgggcggcatcggcgtgatgaacatcatgttgatgacggtgcgcgaacgtacccgtgaaatcggtatccgcatggccacaggcgcacgccagcgcgacatcctgcgccagttcctcaccgaagcggtgatgctttcggtggttggcggcctgtgcggcatcgccctcgcactgttggtcggcggtgtgctggtgctggccaaggtggcggtgcagttttccctggtggcggtgttcggtgcattcggttgcgccctcgtcaccggcgtcgtattcggcttcatgccggcccgtaaagctgcccggctcgatccggttaaggcgttgaccagtgaataaacgatccctttacctgcccggcctctgcgtattgctcagcgcctgcaccggcaacccgccagccctggacagcggcatcgcaccgccggccgcctggcaatataccgagcgtgcggcggcgcaggccaccaaccggcaatggtggacacagttcggcagcccgcaactcgaccgcctggtcgatcaggctcgccgcgacagctacgacgtagctgccgccaccgcgcgcgtgcgtcaggcccaggccagtgcagtgatcgccggcgcaccgctgttgccggaggtgaagttcaacctcgccaccagccgtcaaaagttgctgcgcggaccgggcgggcccgatctggatgcgtcacgcaccaatgatgccgtcgacaactttggcgccaacctcaccgccagctacgaagtggacttctggggtggccgtgccgccgcccgtgacagtgcgctgcatagcctgcgcgccagcgagtttgaccaggccacggtggagctgaccttgctcagcagcgtggccgaccgttacgcgcaaaccctggctgcccaccagcgccagcagatcgccgaactcaacctggcgaacgcgcgcaacgtactcgacctggtgcagacccgctatgacgccggctccgccactgccctggaactggcccagcaaaaaagcctggtcgccagccagcaacgtcaactgccgcttatccagcaactggccgaagaatcgcgcatcaccctggccgccctcctcggccagcccgtgcaggccctggagctgggcagcgaaccgttccaggccctcacctggccgaccatcggcgccggcatgcccagccagttgctcagccgtagacccgacatcgccaaggccgaggcgcaactggcggcggcgcaagccgacgtcaccgtggcgcgcgcggccatgctaccagccgtcacccttggtgcgacgcttggctccgacgcttacaaggccgcagacattctgcgcagcccctactacacgctgaccgccggcctggtcggcccgatcttcaacaacggccgtttaagcgctgaacgcgacaaggcccgcgcccgtcaggatgaactgctgcaaacctatcgcggcgcgatcatcaacggctttgccgatgtggaaaaagccctcagcagcatcacccgcctcgaccagcagcgccaatggcagcgtgaagaactgcaacaggcgcagacggcgttccagatcgccgaaagccgctaccaggccggcgccgaagacctgctcaccgtgctggaaacccagcgcacgctgtacgcggcccaggaccagaatgtgcaactgcgcttgtcacgcctacaggccagtatcgccctgtacaaagcgctgggtggtggctggcagacagagatccgataaacaaaactccagtttcatacacaagacgttctttcagcctacattcttcgacccaaggtccttggtaaaaaaaccgctatcacacggttgcccgggacctctcgatgactgctgcaaaacacctgacgtgcgcctgtctctggctgctggcaaaccttgccgcagcccagccgttgatcccccccactgccatcgactggttgctggactgtcccctgcccaccgttgaacgcctggaccccgcggtactggaacgtacccaatgcggcaccgtgagcgtaccgcgcaattacgcagcgccccgccagggcaggctgcgcctgtacgtgactcgcgtcggtgcccgcgacccgctgagccgtgaaggcgtgatcattgcccaggccggcgacgcggccaaaaagaatcaggtcggcacctttgtcatccacctggccagcctgtggaacgcccactcccacccggcctatcgcaggctggtggaccgttatgacgtcatcgagctcagcacccgcgacctgagtaccgacaatggcatcgaaatggccgcccaggacctggagttcgtacgtacccaactcggtgaagctcagttgcgttacctgggcaatgccgacagcgcacgcctgggcaaccgctacgccacgctgttccccgagcgggtcacgcgcatggtgctggtcaacgcgcacgcgagcgaaatggcggcgcccttcgtcgaacaattgcgcctgaacgactcggccacacaggacgccagccgttgcatcaaccgctgggtgggcgacttcctggtctacggcaagcaacctccacgctccacgcgctgcctggattccgccgacaggcagtaaccccccgtttgcgacctgttggcctcaaaaacgacacccggcgttgacgctggggggcgatcgttattaagtgctatttatccgcattaatacgataaatcgaacccatgctaagccgcccgctacgacgcaaacgccagaagctgtccgatgtgattgtcgagtcggtcaagcgctccatcgtcaccgacgccttgaagcccggcgaccgcctgcccaccgagcgtgagctgatggaaagcttccagtgctccaagggctctgcccgcgaagcactcaaggccctggaagtggaaggcctggtgagcacccgcaccggccccagcggtggcgcctacctgaaccaggccggcaccgaaccggccagccgtgcactgcgcaactacctgcacttccagcacctggacggcgagcaggtgtaccaactgcgcaaagtcatcgaagtggaactggcggtgtcggtgctggggcgcctcagcgaagacgattatcaagccctgcaagacaacgtggatttctgcagcgccccggaagacagcgaagccggccagcgcgagcaacgcctggcggaactggagttccataacctgctggccaaggcctgccccaacccgctgctgagtttcatggcgcagtttctcaacgacctgctgcgcgacctggtggtgctgaaaaaagcctacaagcccaagcgcaagcagttcgacgcggccaacctggattatcacaagcagttgctgatcgcctttcgtgccggggatgaacgtgcggtacgcagcttgatgcatgaacacatgtgcgatgccgaacaccacatgaccgcccttgaaggccaggtcagcccgcattttctactggagttcgatcactcttaaggaacaccacagaccccatgtgggagggggcttgcccccgatgacgccagcacactcaatattcatgtcgactgacacaccgccatcggaggcaagccacctcccacagttgggctgcatttcaaccacacaccgtttcatccaataacaggcctgcccacaggcccttgctccaccgtatcgccattgccactcctgccaataactaaaccagggagtcaccccatgcagcgtcgtacgttgttgaaagccagtctcaccgcagccgccgccctcagcctcccgctgagcgtgcgttcggcatttgccgccgagccctttaccttttacggcctcaagtccatgtctggcgcgtttgccagctatggcaagtttgccgacatgggttcgcgcctggcggtggaacagcaccccgaggtgctcggtcgcccgttgaactacaaagtcatcgacaccgaaggcaacgccggcaaggcggtgcgcaaggtccaggaagccatccagcaggatggcgcgctgttcttccaggggtgcaccttgtcgtcgtcggcactggcggtggccaaggaagtcgacaaggtcggtggcgtgttcatgaccccggtgggcgccgatgaagtcaccggcaaggactgcaacaaggcgacgttccgctggtcggtgcccacctacggcgcgatccgcgaaaccctggtgccgttgatcaaactgctgcccgaagccaagcgctggtacaccatcaccccgcaatacgtgttcggcgaagccctgcttgaaggcgccaaaaacgtgctcaaggaacacggcctggagcatgtcggcaacagctaccactcgctgcaggagcaggaattttccggctacctgaccaacgcgatctcgaccaaacccgacgtgctggtgctgctcaacttcggcagccagtcgtccaacaccctgcgccaggcggtgaatttcggcatcaaggagcgcatgaaagtgctactggtgtggtccgccggcctcgaccagttccaggaattgggcagcgacgtgctggaaggcgtgtacctcggcgcgcagtactggcaccaggtcgacaccccgctcaaccgtgaactggtcaagctcacccaggccaagtacggcatcaaccccacctacccgctggccgccgattacatcagcaccaaggtcatgctcgaaaccatcattgccaccggcagcttcgacgggccgaccgtggccaaggccatgcagggcctgagtttcgaagggccgaccggcaaggaatcgatccgcgccggtgaccaccaggtgatcaaggattactacctgctgatcggcaaggccagcaacgacatggccgacaaggatgacctggccaaagtgctcagcgccggccagtcgttcccgccggtggacgccacgggctgcacgctcggctgatccgctgaattttgtagcgcaaggccgcgcaagcggcgtcctgccgagggttcctgcatgcttaatctttacctgttccagatcctcaacggccttgggctggggatgatctacttcctcattgcggtcgggctgacgatcattttcggcctgctcaatttcgtcaacttcgcccacggcgcgttctttctgctgggtgcctacatctgctacaccgccgtgagcctcaccggcaacttctggctggcgctgctgatcgcgccactggtggtggctgcgttggcctgggtgatcgagcgcctgttgatccagcgcatctaccacttgccgcacatgttccagatcctggtgaccctgggcatcgcgctgatcatccaggaggccagcgtgatgatctggggcccggtgggcaagagcgtcgcggtgccggaactgctgcgcggcgtgctggtggtgggtgatttcgtctacccctactaccgcctgttcctcattgtgttttccgggctggtcggcctgggcctgtggctgctgctggaacgcacgcgcttcggcgccctggtgcgcgccggcagtgaaagcaccgaaaccgtgtcgctgctgggcaccaatattttccgcctgttctccatgaccttcgccctcggcgtggccctggccggcgtcgccggtgtgctgtttgcaccgttgcgcggcgcgcagccctttgtcggcccggagattctcggcgtggccttcgtggtggtggtgatcggcggcatgggctcgttcagcggtgcgctggtcggcggtttgctggtgggcgtagtgcaaagcctgatgaccacactctggccccagggtgcgagcctgatgatctacggcgcgatggccgtggtgattctggtgcgcccttacggcctgttcgggagagcctgacatgagcgagaaaaatcccctgccgtttgccaagacgcaatcgcgcgccatgttgctgtgggtgctggcggtactgatcggcctgccgttgatattgccctcagcaaccctggccaccgagatcctgatctttgccatggccgccctggcctgcaacctgttgctgggctacaccgggctgctgtcgtttggccaaggcattttcttcggcgccggcgcgtattgcgcggcgctgctgatgatccacctgcaactgggcctgttcactgcgttgctcggcgccgccatcgccggtggcttgctggccttgctggtgggcgccctggcgatccgccgtaccggcatctacttcgtgatgctgaccctggccttcagccagatggcgtattttgtcgcctacaccctcagcgactggaccggcggcgacaacggcctgctcagcgtgccgcgcccggaaatccgcctgggcgacaccgtgctgttgtccctggccgacgcccgcgcgttctacggttttgtcgcggtactgttcctgctgatcttcatcggtgcgcgccgggtgatcgcctcgccgttcggcagcacgctgatggcgatccgcgaaaacgaaacccgtgcctcggccatcggctacgacacgcggcacttcaagatcctggtgtttgtgctgtccggcgccgtcaccgggattgccggggcgctgtacgccatgctgctgcactttgtgccgctgtcgaacatcgacctggcgatgtccgagaacatcctgatcatgaccatcgtcggcggcaccggttcgctgttcggctcgctgctgggcgccggttccatcgtgctgctcggggattttctctccgacctgtggccgcgctggctgatgctgctgggggtgatcctgatcctggtggtgatcttcatgcgcggtggcttgtggggcggcctggcgtcgctgttcgagaaggtgcgcggcagccgcaagagcgtggttgtcgccaaggaggaagggctatgagcatcctgctggaaacccaggacctggaactggcctatggtgcgttccatgcggtgaatggcgtcaacctcaaggtcgaggccggcaccatccacaccatcatcggccccaacggcgccggcaagaccagcctgttccactgcctcaccggcgagcgccaggccaccgccggggcgatccatttcgacggccggaacctgatgcgcaaacccgcccacggccgtgtcggcctgggcatggcgcgctcgttccagctcaccagcctgttccagaacctcagcgtgcgcgagaacctgcgcctggccgcccaaggccgtgacggcgcacgcgccctcaacttctggcgccgcgtagacagccagcgcgaacacctggaaatggccgaccaggtgctggagcgcctgcaactcaccgcccgcgccgacaccctggccggcgagttgtcccacggccagcaacgggtgctggaggtgggcatgtcgatctgctccaagcccaaactattgatgctcgacgaacccacctcgggcatgggcatcgatgacatcccgatcatgacccaactgatcagcgaccttggccgcgaccacacggtgctgttgatcgaacacaacatgagcattgtcatgtccatcagccaacgcatcacggtgatgagccacggccagatcctggtggagggcacgccggaattcgtgcgcgccgatgaacgtgtgcgcaccgcgtaccttggggaggctgcctgatgctgatcgtcgagaatatccattcgtactacgacaagagccacgtactggaaggcgtgtcgctcaccgtcaaccccggcgaactggtgacactgctggggcgcaatggcgccggcaagaccaccaccctgcgcagtatcctcggcatcatctgcccgcgccaaggccagatccacttcaacggccaggcgctggtcgggcagaagatcttcgaaatcgcccgccagggtttggcattggtgccggagaaccgcgggattttccgcttgctcaccgtcgaggaaaacctgcgcatcgccgcccgcaagaccagccgctggcagcttgaagacgtctacgccatgttcccgcgcctcaaggagcggcgcaaaaacgccggccacgcgctgtctggcggcgagcaacagatgctcgccatcgcccgcgcgctgctcaacgaccccaagctgctgatcctcgatgaacccaccgagggcttggccccggtgatcgtcgacgaactggtgaagatcctgcgcaaggtcaaggacgacggcctgccggtgctgctggtggaacagaacctgatggtctgcgacaagctcgccgaccgccattacgtgctcgaacaaggccgcgtggtctacgaaggcagcgccgaagccttccgtgccgaccctacgatcaaaaaccgttatttggccctgagtgcctgaccggagactgctaatgaacagttttacgcaaccgctccagagcaacgccccgctgatcaaccgcgaccgcctgtggcaatcgctgatggatttggcccaactgggcgccacggtaaaaggcggcgtgtgccgcctggccctcaccgacctcgaccgccaggcccgcgacctgtttgtgcaatggtgcgaggcggccgggtgcagcgtcagcgttgacgccatcggcaatatctttgcgcgccgtgccgggcgcaaccctgccctgcctccggtgatgaccggcagccatatcgacacccaacccaccggcggcaagttcgacgggtgctacggggtgatggccgggctggaagtgatccgcaccctgaatgatttaaagattgaaacccaagcaccgcttgaagtggtggtgtggaccaacgaagaaggctcgcgctttccaccgtgcatgatgggctccggggtgtttgccggtaagttcgacttgcaggacacactcgacaaagtcgatgaccagggcctgtcggtgggcgccgaattgcagcgcatcggttacgccggctcccgcgccgtgctcggccacccggtgggcgcgtatttcgaggcgcatatcgaacagggcccggtgctcgaggaccaggccaccacgattggcgtggtcatggggtgcctgggccagaagtggttcgacctgaccttcaccggcgtcgaagcccacgccggcccgacgccgatgcacctgcgcaaggacgccctggtcggcgccgccgaggtggtcagcgcggtcaaccgcatcgcccatcaacagcagccccacgcctgcggcacggtgggttgcctgagcctgcacccaggctcgcgcaacgtgattcccggccaggtgcacatgaccatcgacctgcgccacctgcacgcggacacgctgcaagccatggtcgatgaagtgcgcggcgtgatcgaagccaccgcccagcgacacggcctgacctttgaactgacgcccaccgccgatttcccaccgctggacttcgccccgacctgcgtcaacgcggtgcgtgacggtgccgaggccctgggcttgagccatatggacatcgtcagtggtgccgggcacgacgcgatcttcgtcgccgaactcggcccggccgggatgatctttgtgccgtgcgaaggcggcatcagccataacgaaattgaaaacgccgcgccggacgacctggcggcgggctgcgcggtattgctgcgcgccatggtcaatgcggcacagggggaaacggcatgagtgagatcggccaactgacggcggtgcaactgctgcagcattttcgcgacaagaccttgtcgccggtggaggttaccgaagacgccttgctgcgtatcgaacgctacaacccggtggtgaacgcctattgccacgtcgacccggaaggcgcgctgagtgcggcgcgcgcctcggaacaacgttggctcgacggccgaccctgcggtgcgttggacggtgtgccggcgtcgatcaaagacctgacgctgacgatcggcatgccgacccgcaagggctcgcgcacctcatccgccgaagggccgtgggacgtcgacgcgcccttcacagcctttatgcgcaaggccggcgcggtgctgctgggcaagaccaccaccccggaattcggctggaaaggcgtgaccgacaacccgctgtacggcatcacccgcaacccctgggacacgcgcaccacggcgggcggctcgtccggcggcgcaggcgcagcggcggcgttgaacctcggcgtgttgcaccagggcagcgatgcgggcggttcgatccggattccctgtgcgtttaccggcaccttcggcatcaagccgaccttcggttatgtgccgcaatggccggccagctccatgacgattctgtcgcacctggggccgatgacccgcacggtggaagacagtgtgctgatgctgcagaccatcgcccaaccggacgcacgggatggcttgatcggtgctccacgcaccacaccatggctgacgccgggtacggatttgaaaggcttgcgcgtggcctacagcccgaccttcggttacgtcgatgtcgacccacaggtggccaaggtagttgccgaagcggttcgaggcctggaacaactgggcgcccatgtcgagcagatcgacccagggttcagcgacccgctggaggtgttcagcaccttatgggcagccggcgcagcgcgcctgaccggcgccatgagcgaggcacaaaaacagctgctggaccccggactgttaaggattgcaaaacggggcgaacagctgagcctggacgacttcagtgccgcccttgaagcccgcgccgcattggtagcgcgcatggccgcgttccatgagcattacgatgtactggtgtcgccgatgatgccgatcaccgcattcgaagccgggcacgacgtaccgcccggctccggcttgcaggcatggacacagtggacccccttcacctaccccttcaacctgacccagcaaccggcggcgtcggtgccgtgtaggttggcggcgaatggcttgccggtggggttgcatgtggtgggcgcgcggtttgccgatgagcaggtgttgcgggtgtgccaggtgtatgcaaaggcattcccgaccaagcacctgcaggccccaatcaccagaacaccgtaggaccccatgtgggagggggtacacgcagatggtcctggccctatctggctgaggacgaacactgcaactgtgggtacttttcgccagttctacctaaagaccttgggagcaagcctccttccacagtatcgggcgcattcctttacactgtcccccattcatccccgggggcttcatggacatcgaactggcacgcaccttcctcgaaatcacccgctgcggcagcctcgccgcagcggccgagaaactgcacgtcacccagaccgccatcaccgcacgggtcaagagcctggaaagccaattgggcagcacactgttcgtgcgcaaccgcgccggcgcccggctgaccgccgatggcgaggccttcgtggtgtacgccaaccagttgctgcagacctgggaggccgccaaacgcgacctgccgctgcccgatggctatcgcaacgtgctgcacatcggtggcgaagtcagcctgtgcaacccgctgatgctcggctgggcccaggccctgcgccagaacattcccggccacgccctgcgcaccgaaatccgcgaaggcgaatacctgctgcgccaactggagctgggtgtactggacgccgccctggtgttccagccgcagtactggccgggcttgcaggtggagcaggtgctggaggaaaaactgattctggtgcagctggtgagcaacccggcgccctatgtgtacatcgattggggacccggttttcgtcaacaacacgacgccgccctgcccgacaaggcccgcgccgcgctgagtttcaacctggggccgctggcgttgcagtacatccttgagaacggcggcgccggctatttccggacccgcgtggtgcagagctacctggacagcggcgtgatgcaacgcgtgcccaaggcgccggagttcagcttccccacctacctggtgtattcacgggcgcgagactcggcggtgttgcaacaggcgctggggttgctgcgcgaggtggtcaaggccgaaagcgactggtcgcaacgctgggacccgctgatttgaagcaacaatatccgccgcgcatgctagcctgcgggtgtttccttttgcagccttaccgatgaacaagaaaaagtccgtcaccatcagcgacatcgccaaacaggtcggcatgaccaccatcacggtgtcacgggcgctgagcaaacctgacctggtcaagccggccaccctggcacgcatcctcgaagtggcgcgggagctggactacgtgcccaacgccttcgcccgcggcctcaagcgcagtgaaagcctgatcatcggcgtgatcacggcgtcggtggacaacccgttctacagtgaaatgatcaaggcgatttcccgcgaggccaagcagcacggctacaccatcatgctggtggacaccgatgagctggaagaactggaaagcaaggccgtggacaccctgctgggctaccgcgtggcggggatcatcctgtcgccggtctcggatgagccgggctaccagcccgactacctcgaacgcctggccaacggcaagaccccggtggtgctgctcgaccgcacgatccacgacagcccgttcagccgtgtggtgctcgacaactaccacagcggcatccaggccgcgcactacctgctgcgccagacgcccgacctcaggcgcctgctggtgctgaccggccccgaacattcacgcatcaccgtggagcgcctcaagggcctgcgcgaagtgctggccgaacacccgcaggtgcaggtcgaagtgcaggccggcgactacacgctgatgccctcctacctgcataccctcgactacctggccgaacactcggcgccggacgcgatcatggggttcaaccagttgatcaccctcggcgcgctgcgcgcgttgcgcatgcacaacatcccccacgacagcctgaccatctgtggcatcgaccgcctgcccttcgccgatatcttcggcgtgcccatcgcctgcgtggcccatgatgcgtccctggccggcagcagcgcggtacgcctgctgctcgaccgcctcgaagacccgagcaagccgcgggacaaggtggtcatcgctggccagttggaaaacggctaacgactggtataaccgccgtcgatgggcaggctgacgccgctgatcatgctcgccgcgcggctcagcaggaacagcaccggcagggccacttccgcggtttgcgcaaaacgccccaaaggaatcgccgccagcgccgggtcacgcttggccggtgcggaccacgccatggtcgccatcggtgtgagcgtgaccgttgggttgacgctgttgacgcgaatgccgaagcggccccactcggcacattgcacgcgggtgatcgcatccagcgccgccttggaggcgcagtagccgaggtgatcgtccagcgccaccaacgaggcctggctggagacgttgacgatgctgccggcgatctgcgcttcgatcattttcgccgccacacggctggcgacctgcgcagcggcgcgggcattgacgttcatcacctggtcaaacgcctcggcgctgatggcagcggcaggttccaggcgcgagatgccggcgcagttgaccaggccgtgcagcggcggcaggtcttgcagggctttgtcgagggccgtgctgtcagcgatgtccaggcagaggctgtggcaaccgagttgggccagggcctgcgcgtcgcggccgagggcaaacacgtcggcgccgctggcgatcagttgcagggcgatttcacggccaatgccgctgctggcgccggtgacgaggatgcggtggtgggtgaagtcgaaggcggcgttcattcagttctcctgcaggctgtgcatgatcggtttcagggccggataaagcttcaggtattcgccgaatgcacggtcatacgcctcgacgttttgcgccttgggctcagcgcgcagctccagttgcacccagcccttgtccatcgccgcatcactcaccaaccccaccgtatgcgccgccagcaacgccgcgcccaacgccgcctcaacctcctgaacgatggtgtacaccgggtaccgcgtgacgtcggcgatgatctgcatccacaggtccgaatggctcgccccgcccaccacgatcaagcgcgggtccagggagtgcgcaccgcgcgtacccgcttcgatgttatgccgcaaggcaaaactcacgccttccagcacggcgcggtacaggtggatcctggtgtggtacaggttcaagccgacaaaactgccactggcgcggtcatcccacaccgggctgcgctcgcccatcaggtagggcaagaacaacaggccctcactgcctgccgggatgtgcatcgcccgctgttccagcagcaccaggctgtcctggccgctggccttggcctgttgctcttcggcctggcagaactgctcgcgaaaccagctcaccgaagccccggcggtgatcgcaccaccgaagatgtacaggtcacggtggccgttgtagacgtggggcatgctgaccaggccatggcgcgcatccacctgctggttgaggtaaccccagcacatgctggtgccgatcatcgccacgtggttgcccggttgtgtcacccccgccgccagcgtggccatggccgcatcgacgccacccgccaggatcggcgtgccggcctgcaggcccaggcgtgtcgcccaggcctcaagcaaaccaccgaccacctccccggaatgcaccaagcgctgcggcatcatggcctgcgggatacccagcgcatcgagcatctcggccgaccagccacgcgccttcacgtcgtagacgccaccgatgttgccggcactgctgtggtccaccgccaactcaccggtgaagcaccagttgatgtagctgttcggtggcagcaggtagcgggttttcgcccacacctcgggctggtgctgcttgagccagagcatcttggtgaaaccgtagtagctgtccaccgagttgccggtcacctcgaacaggcgctccaggtccacatgctcgcgcacccaggccacttgctcgccggcgcggcggtccatccagatcaggcacgggtgcagcggtgtgagctgcgcatccaccgcaatccccgagccgccatacaggctgctgatgcacagcgccttgacctggtctttcgccacagcggccttggccatgcactgcgccacgcaggcctcgacggcgtccagccagacctgcggccattgttcggcccagcgcactttcggggtatccacgcgatacccctggctgtgctgggcgatgatcgtgccgtgaccatccaccagcagcgccttggtgctctgggttccgatgtcgacccccatcacgtaattcatgttcaaaccaccggcttcaacagcaccttgatcgacttggtcgagttggccaactcaaaggcttcggcccagtcgtccagcgggaagtcatgggtgacgatgcctttggaggtgaccaggccgcgctcgaacaggtcgatggcgatcgggtagcaatacgggccgaggtgcgcgccgcgtacgtccagttccttgcggtcgccgatgatcgaccagtcgacgctggtctcggcgccgaacacgctgaactcgacaaaacgcccgagcttgcggatcaggtccaggccctgggtgacgccggccggtacgccagtggtttcgatgtagacgtcgcagccgtagttgtcggtgaggccgttgatgatctcgcgggcgttgtcgcgggccgggttgatcaccacgtcggcgccaaattgcttcgccagttccaggcgctcgtcgaccatgtcgatcaccaccagtttcttcggggtcttcaacgcggcgacctggaccatgcacaggccgagcgtgccggcgccggcgatcaccaccacgtcatcgagctggatatcgccacggttgacggtgtggatcgagcaggccatcggctccaccagcgccgagtcttccagcgacaccgactcgggaatcttgtgcacgatggcagtcttggggatgcgcatgtactgggccatgccgccttcggccacttcacgctggaagccgaagatgttgtgcacttcgcacatccagtacttgccggacttgcagaagcggcacttgccacagggcacgatctgctcggcgatcaccttgtcgccgaccgcgacttcaaagtgctcggcggcgccctcgccgacttccaccacataaccgaaaaactcgtgccccggcaccaccggcgccttgacccaggggttgtcgccgccccagaacatcgcagcgcccgagtggcacttgcagtcactggcgcagatgccgcaggcggcgatgcggatcaccagttcattggcgcgggcctggggtttaccgatgcgttccaggcggtagtctttggggccgtggcagacgacggcttgcatgtcggtgtgcttgtccatggtgtcgagtcctgtgcttgttaggagtttatttgtggcgctgacggctgatgaaaatcgccagcaaaatgatcgcgcccttgatcacgctctggacgtagggcgacacgccaagcatgttcaggccgttgttcagcacgccaagcagcatggcgccgagcaaggtgccgacgatcaccccgcgcccgccggcaatcgatgccccgccgagtaccacggcggcaatcgcatccagctcgaacgacacgccggcattcggctggccgctcatcaggcgtgaggtgagtaccagcccggcaatcgctgcggtcaggccgctgatgccatacaccagcagcttgaagcgcgcggcacgcacgccggagaggcgcaccgcttcttcattgccgccgatggcgtagatgtagcggccgatgcgcgtgtgttgcagcagcacataggcggcggcgtaggtgatcagcatgatcaggatcggcacttcgatgccgaacaggctctggcgaccgaagaagccgaaccactccggcagcccggaaatcgggtagccgtcggtgtacatcaggcccaggccacgggcgatgcccatggtcgccagggtcacgatgatcggcggcatgtgcaggtaggcgacgaacaggccattgccgatgccgaaggccacgccgatcaacatccccgcgccaatcgccaggcccggcggcaggcccgcgaccatcaacccggcggtgagcgtgccggacaacgccatcaccggccccaccgacagatcgatgccgccggtgagaatcacgcaggtcatgcccaccgcgatgatcgcgttgatcgacacctggcgggcgatgttcgacaggttgctggcggtgaggaaggtgtcgctggcgaggatcatcaccagggtcaccaccaccagccccacgaacggatagaacgccggcgagcgcaccagccgcgccaggttcaggcgcagccggctgctgtcgacggtgttaatggacgtattcacttgagccccctgttgcatggcgcatgacctcttgaggattgacggcggacgcttcgaggaccttgacgatggcgcccttgtgaaacacggcgacgcggtcgcacatgccgatgacttccggcagctcggaggaaatcatgatgattgcgtagccctgttcggtgaggctgcgcatcagcgcgtagatctgcgccttggcccccacgtcgatgccacgggtgggttcgtcgaacaccagcacgtcgcagtggtggttgatccagcgggcgatcaccaccttctgctggttgccgccactgaggttgaacacccggctttcgccgctgggggccttgatcgacagctggcgcatcaggtcttcgacactggcgcattccctggccttgtcgatcaggcccgaggcgttctggtatttgggcaggttgttcagcgagatgttttcacgaatgctgaaatcggtgatcagcccttcgctcttgcggctttccggcagcaggccgatgccgtgggcgagcgcctgggccgggtcatccagggtaattttctcaccgcgtagccacacgtctttgctcaccgacggcagcgcgcccatcatgcccagggccagctcggtgcgaccggaaccgaccagaccggcaaagccgaggatctcgcccttgtgcagttggaagctgttgcgggggccgttgcgcaccagctgaatgtccttgacctccagcaacagcgggccgcgctcggtgttcggtttgggcggaaaactgcattccaggcggcgcccgaccatcatctcgaccaggcggtcgatatcgctgtcggccacgtcggtgacgcccacattgccgccgtcgcgcaacacgctgatgcggtcacacacctggaaaatctcctccaggtgatgggagatgaaaatcaccgccacgccctggcgcttgagctcgcgcatgatctcgaacagcagttcggcctcgctgggggtcagcgtcgcggtgggttcatccagcaccaacaggcgcgcatccagggccagggccttggcgatttcgacaaactgctgctcggccacgctcaggtgcttgaccgcacattgcaggtcgatggtcacgccgaggcgcttgaacaacgcctcgctggccgcgaccatttcgcgcttgcgcagcaggccgaagcggttgctcagctcgtggccgaggaagatattttccaccgccgtgaggtagggaatcaggctgaattcctggaacacgatgccaatgccggcggcgattgcatcgcggtaggtcgcgaactgccgggcctggccatcgatcaggatctggccttcgtcctgatgctcgacgccaccgaggatcttcatcagggtcgatttgcccgcgccattttcgccgagcaaggcatggatctcgccgcgctcgacctgcaggttgatggacttgagggcctgtacgcccgggtaccgcttacagatgttttccagcttcagaagactgctcataccgccgacctcgtattcagaaggagaccgcaagccccacggatggcgtggggcctgggtgatttaccagctgaaatccttggccttggcctggtcgatcaaggtgatgtccaccgggatggtggccggcacttgcgagccccacttcttggccagggcgatgcccagggcaaggcggatctggtcacgagggtattgcgccgaggtggcgatgaatttgctgccgggtttctggatcgccttgatcgcttccggcgcgccgtcgacgctgaccagtttcacgtccaggccgctggcttcgatggccgagagtgcgccgagggagccgttgtcattcacgctgaaaatgcccttgagggtgggctgggcctgcagcatattttcggtgacggtcagcgcctggtcacgttcctgcttgccgttctggatgctgacaatcttgatgtccgggtgcttggccacggcttctttgcaaccacgcacacgctccaggatcggcaccacggcaatgccgtcgaggatcgcgatattgcctttgtcgccgatgctcttggccaggtattcacaggcctggaagccagcgtcgaagtttttcgaaccgacaaaggaatccagcgggccgtccgcctgggcatcgaccgcaaccaccaccacgccggcggcgtgggcagacttgacggccgattgcacgccgaccgagtcggtggggttgatcagcaggatatcgatgcctttttgcagcatgtcttcgacgtcactgacttgcttggacacgtcatgacgggcgtcggtgatgatcagtttcgcgccgatggtcgccccggcttcttccagggcgtttttcatggtgacgaaataggggttgttgatttcctggaaggacgcgccgatgcggatcggcttggcggcgtcggcaaaagcgggggcagcggtaccgagggtgatgcttacagccaataaacacagggttttcgggagcattttcatggcgtggttctctgttttgtttttattgttagagcaaatgttatcgttaacattttgcgagaagctaacaaggaaattcgggtgacgcaaggggccactggtcggcttcggtcggaatgtgggagggggcttgcccccgatggcggagtgtcagttggcgatgtaagtgactgacctgccaccatcgggggcaagccccctcccacacgtgttcatgtgtgcaccacaaaacctcgcacaatcttgagtaccaactaagctcagcctccaacaaaaaagaccgagctgcctgccatggcccatcccaccgagacctttcgcgcccgttaccgcgcccaagtcgcgccccactacaacccctggctccacgccagtttcgtgttcggctacggcatcgcgtgcatcagcctggcctggtcatcgacgcaccagatcaccgcgctgcaatggctgaccgtgcccgcgacgctggtgttcttcaacctgtgtatctacttggtacaccgccacctcggccaccacaaacacgccctggcccgcctgttctatgcgcgccacaccggcgatcaccacagttttttcacccccggccacatgacctacgacagccctagggactggcgcgtcattctgtttccggcctggctgatcgtgctgcacagcctggcgatcaccctgcccgcctggtggctgctccagcagttgagccccaacgtcgccggattgttcgccgggtgcatgctcctcggatatttgctttacgaattgtttcacgcctgcgaacacctgcccgccgaccacccagtggcacggctgccgtggctgcgccagatgcaccagttgcataccctgcaccaccgccgtgagctgatgcaggggcacaatttcaatatcgtcctcccgctgatggattacttgttcggcaccctgtactgggagccgggcccccacgacaaccaggaatcgtcatgagtacccgtcccaaaaaactgcgtcatctgttgtttgtgctgtttctgctggtgatcgccttcttgctgttgatgcccaccaaagtgcaaccggtgaactggacaccgcccaagccgccgtcgctgaaggacggcccctacgccgaaaaccagcgcctcaagggcgtgcagaagatcggcgcgcaggacatcgccgggcccgaagccttgctgctggatgcccagggttatctgatcagtggcttgcatgacgggcgcatcatccgcaccgcacccgacagccgcagcctggaggtactggccaataccggcggtcggcccctgggaatagcgctgcacccggatgggcgcttgatcattgccgatggcatcaagggcctgctcgccctggatgcaaaccgccaactcactaccttgagcacgggagccaataacgtccccttcggtttcaccaatgacgtcaccgtggacgccagcgggcgttatgcctacttcagcgatgcatcgagccgctggggttatgggcaggacggcgaagcggtgatcgaacatggcggcgatggtcggctactgcgctatgacttcagcaacggcaccaccgaggtgctgctcgaccagctgcaattcgccaatggcgtggccctgggcccggatgaacattatgtactggtcaatgagaccggcgcctatcgcatcagccggtattggctcaagggcgaacgtgccggcagccatgacctgtttatcgacaacctgcccggcctgccggacaacctcagtttcaatggccaggaccgcttctgggtggcgctgtattcaccacgtaacccgctgctggacagcttcgccggctaccccatgctgcgcaaagtgatggtgcgggcgttgatggtggtgcccaagccgatcgagcgcaaagcctttgtgctggggttggatacgcaaggcaaggtgattgccaatttgcaggatggcagcgcgggcaactactcgcccattaccaccgctcgggaatacggcgagtggttgtacctgggctcgctgaagagtacgagcatggcgcgcctgccgttggcactggcgttggcgccctgacgcaaaaagggcatacaggcgctcggcctgtatgccctggtggttaccggttaaacacgcttagctcttggtactgctgagcagggtctgcttgcacaggtggccaaagctgacgaactggacattgtcaccgccgacgccaatacccggatattcgagcacttccatacgccatacgccgtagttgaagtcggtacgccaggtgtttttgtagccctgggcgtagtcgacaaaggtggtctggaagtcaccgaagcaggtacctacgttgatcgtgccccctgccagaccggcgctgttggtggccgccgaatagcctttgtagacaatagcgccggtgtccgggttgatgtgttggtcgaggtagacgatcgggtgcagccccaccaacggtgcgccggtgctgtccgacagccccatggtccagctcaggtcgcgataggcctgggtggtcatgtagccataccccacgttggacgcggaggaaggaatgcgcaacacgttgccttcgcctttcacatcagggttgttcacccgagggttggaaccgaaggacaggttgtatttgcccgtcgcgctccaaggctcattcggatgttggttcggacgaacacgcaccttgaccaccccgccgacacccgggttcgggatcgacgtcgacacgacattcgcgcccacggtgacccactggctgccatcgaaacgctcaaggatccacttgttgcgcgtgctaccactggccgcgtcggccgtcagcgcgatgcctacgctctggccacggaccgccgtgaaatcaaagtagtcgacgtcgttgaggctgtcggcgttgcctttgatgtagttcagggtatccggcagttgaaacgccgtgtcgggcgtgtcattgggctcataggcatcgatattggcatccaccgccacaccgaactggaagctggaacccggcaccgctgcgttggcttccatgaaccagtagtagtcaccggcaggcaccacaccgctcaggctttcatcgcccgtgcctgggttattggaggtgcccagcgggagcggattgccttgaccatcgtcctggaacagggtcaacgacatgtcggtgcctgcggtctggccgaccagcaacgcgttgatgcgcgccttctgtggcaggttgaagtggtagcacagcaggtcaccggtctgcacgccattgagggtgtacaactggttcacgtccagcgtggtttcgcagccctggaccagtgccgcctgcacggcggccgctgcctgggcatcggctttcctgacctgggtcaccggcgccggcgcggcgtgatcttccaccaccgaatcggcctgggccttggcggcgaacgccggttttttcagttgagcgcccgctttgagttgctgcttgagcgtcgcaggggccttggtggccggtactttaccggcggccttgaggctttgcttgatgtcagtttgaacggcttgggcagccaggtgagggtattgctcggccagggcgaaggccgaaacgaagcaggaggccgccatggccgcgcccagcataaaggcttttttcgatttcattttttatccatccatagttaaaaagtgaagctcaggtgacgtccggtcacctgggatggaatgtaggatatgactggatggatgtacagtattttttgaaagaatttcaatttctatggaatggggatgtcacaccaccagcgccagaagctccagacagctgtcccgaaggcccagatatagccaactttataaggccacacaatccaacgcttgagcgccacaggaactgacgctaattcagcctccgtcacaatgccggcttccacatggcgctttgagtctgagaagaactcggaaataagcaacatgcgatattgcctgtcgatccactggtttcgcttccaaaatcgcttattgtcttggaccctttcgttctgacggaaataactttccacctcatcgagctttgcatattccgcaaaaatcatcagtcccaagacaacaaacgtcccgacaaacaacacgatggagtagatgagaaaaaaattcatggttaggctccctcgggtaggaatatcaaatccccatcgacttccatgatctctcctcccaaaaacgccccagcactaccgaccccctcacctcccacataccctcccgctgagcctccgataattccgcaggcgagttcacctgttcccttcatgcgaatgcctaggaacattgtgcatgccctacgagcggctcctgcgccgattcttcccaaaaaggcagctcctgagactccccccgccaacctccccgtctccacatacttcgcccgtctacactgcacctcccgcccctccacacacgcctccttgatctccaaccccgccactcccacatccagcgccaaccccacataagtccctttacccaaccacttcgacatctgcgcaatctcccgcatccgcttcgcatacccggcgatctcacctttatgcagatagctcttggtcgataggcccaatacctttttcagcgactcattgccctgcaaccccgtccccaaccgtgccgcaccgtgcagttgcacctccaaccgccggaacaacccctggcgctgttgaataaacgccgtcctgtccaacgcaccgtccttcaaccgctgatgcaaccgctcgatctcctccagcgtctgcgccacttcatccaagtgccgcgcccaggccgacgtcgcgctgccgatgccaatcgagcccttcgccatgaaactctgcagcaagtcatagttgtcgatcaccgtcgtgccggccgcagcacttcccttcagatggcggcgtacctcctcggcatgccgcatcaaccaggcctcctcgaccgagcaattcacgctgtggctgtcgggaataatcaccagttgccccggcgccaccaggccggggcgcaggtgccggttcaacacatcaaaatgagcggagcgctggcggctgggggcaccgcccatcagtcggtttttcaagctctgatagtccgttacgcggttgttgataaaactttgcgccatgcctcacatcctgtgagcagtgaagatggcgtcgaaatataagcaagcacctgcgccccggacacacgtccaggggggggcgatttacatttgggaagctgcctacgcagcatagaaatacagcctacggaaacaaccctaatacccagtcatttccaggtaacccaccccaccctcgaactgcaccgggccttcccagtacgggatactcaggttcatccaggcattcgggttgaccgcttgcgtggtgatatccagctgcttgccggggattttcagcgaccagcgagtggggatcttgcgcccttcaatagtcgtcgtatccagaggcgtcagttggatatctgcgttgtgcagggtttgtgtatggccctcgcgatcaatccaggtgccggtcaggtaggacgtgccatcggtttgccgtacacgaaacagcatcaattgctcgccccggtccaggtgcagggaaaaccagtcccagccggtctggctggcggtcagcggttggctgctccattcgcggtcgagccaggccgggccgctgacttgatacaccctgccgtcaatgctgacgctgccacgggcactgaaaaatggctggctgtagtagtacgaagcctggccctggtcggattttcggctgtagccgtggtcgccctgcagcaccaatggacggctggacgtcaggtgcaggtcgtaggcgaattgcgcaccgctagccttgagttgcatgtccgccagagggctctctgcaccagggcgggtggcgaaattccagtcgtcgatccaggcattgaacggcactgcctgagctccggcctggccgacgccgccgcgtgcgtaacgttcggcagcgtaatggcgggtggcggacgtaacggcggcgtggccgagccacacggtggagtcgtgccagcccgcttgcactggcccggccttgagcgcgttgcgaaacagcgtccactgcacgccgaagacattgccttgcgcgtccttgaggttggcggtgacgtaccaccattcgatacgaaagcccgcatgggggccgtggtcctcggggaagctgaacaccttgcccggcaccacctgggcaaagtccgccgcgtcgctgcccagaccggcaaagctctcctgcggcgcgggtactttgtcgcaagcggccagcagcaaacacgccaacaacaggggcttaatcttcattggcaaacgtcctcaacaaatccgcaggacggctgcggtacaactgccacaacggccaggccgacgccagcaaggtcgccagcatcgccagcccgagcaattgcgccagctgccacgggaacacctgcagcggcaggcgccagccaaacgcctgcacgttgatcactgcatccaggcaccaggccaacagcaggccgagcggtaccgccaggaccaatgtgagcaccgccagcagccaggtctggccgaggttgagcagcatcaattgccgacgcgtgacgcccaatgcccacagcggtgcaagctggcccaggcggctctggctctgggtcaacaggctgatgaacaatgccacgccggccacacccaaggtcaggctgttcagcgcggcagtggcggcgaaggtgcgctcgaacacctggctcgaccagcccttgagttgctgctgatcgacgatacggctgtcgtccagagcaaaggcgcgttgcacctcacgtaccagcggcgccacgtccggcggcgagacccgtaggttgaaacgcgccggtgacagcgtcggccagtgcgccagcagatgttgtgaattgaccagcacatgccccttggggttgccgtagtcggcgtaaacccccaccaccttcggcgaccacacaccttgaggcgtggggatgttcacggcatcgcccagcttcaccccgagccggcgcgccagttgctcgctgagcatcaaggtgtcgcccttctgcaactggtcccagggttcgctcgtggcctccagcagcggccaatgctggcggtaggtgggatcatcgaccacaccaaacaggtccgccggccagccctgcacttgcacggcgacctgccaggtgggcagcacggtctgcaccaacggctgttgcaccagccaggtgccgagttgttcggcctgggcaggggtttgtgggttgagatacagctcggcggtcagacgttgctccagccagttgttgaaggtatgccgaaaacccgaggtcatggagcccgcgccgatgtttgcggccagcgccaagagcaacgccatcagggccaggctcaaggccggcaactgctggcggcagtcggcgagaaaccactggccgagcaccgaacggctacgccccaacacggccttgagcaggccgttgagcagcaccggcaaaccgagcgccgcacccagcagcaaggcggccatcagcacaaacccggcagccaggctattgcccagccacagcgccagcaaggcgatcagcaaggcggcgccagccacccacgcttgacggcgcaaccaacgcccgtgggcttcatgccaagcctgggcattggccagcgccagcaagggcaggcgcgctgcccgccacaggctactggcaccggcgagcagcgcaccgatcaggctcaagcccagccctgcgccccaccaccaggggctgaggctcaactgccccgggacttcggcgccatacaaaccacgcaggctggcggccacatcgggcaataacagactggccagcaagtagccactggcgacgcccagcacacctcccagcaacgagagcacgcccagctccacactcaggctcacaatcagcatgcgcacgctgaccccacaagcgcgcaacgtacgcagcaacccgcgccgttgctccagggccaggccgatggcggcatgcacaatgaacagccccaccacaaaggacaggaagcccagcgcgtcgaggttcaggtgaaagctctcggtaaggcgtgcgaggttgttgtcctcgccttgcttgagctgcaacccggcgggcggcgtgggctggctggcggcgaatgccttgtccaccagcaggcgcgacaggcgctcgggcatctccagcacaggctgggcaaacccgatgtcggtgagcaacaggccgggcgccatgtctggttgggcttgcaatggcggcagtgtgcggccgcccacggtggtcggttgctggccttcgcgcagtcccaaggcctgcaaggtctgcggcgcgatccaggtacgccccggcggatcaaagaaggcgagcatctgcgcctggctcaagcgctgccccgccacggcgccgctgccgggcaacgacaacgggtcgatgcccatcaactgcaggcgtacctcttccaggcccttgagctgcactcgcccctgcaccaccggcgagaccggccacccggcgcggcgcaattgggcgaagatcgcctgggggaaactcgccccgtccggcgcaccgaggctggcctggggttcaccgccgatcaattggctggcacgggcatagctgtcacgcgcctggctgttgagggcttgcacgccgatcaacagtgcggtggccagccaaaggccggtgagcacgctgaaaaactgcacaggatgccgtcgccagtggctgagcaatgcgcgcaaggtccactgaaataccgccatctcaggcggcgcctgcggcgagaacgcgcccacgctgcaacaccacctggcggtccagccgtgcagcgatgcgcgggctgtgggtgaccatcaacaggctggtggggctgtcgcgcaagaggtccagcaacagttgcagcacttcgtcgctggtcgcctcgtccaggttgccggtgggctcgtcggccaacaacaggcccgggcgtgatgccaatgcgcgccccaccgccacccgttgctgctggccgccggagagctgttccgggtagcgcttgagcaaatcccccaggcccaggcgctcgaccagctgcgcctgccactgggggtcaaagcgtcccgccagccgcgcctggaacgccaggttgtcctcgacccgcaagctgccgatcaggttgaactgctgaaacaccaggccgatttcggtacgccgccaatgggccagttgcgcttcgctcagttgatccaggcgctgctcgcccacctgaatgctgccgccatccacacggtcgagcccggccaccaagtgcagcaaggtgctcttgccgctgcccgactcgcccatcagcgccaggctgctgcgctggcccaggtgcagatcgacaccggccagcaccgccaacggcccctggggggtggcatagcttttgatcacaccttgcacctgcaacatgacaacactcgtttgatgggcggccatcgagaataacggctgccgaccaaggccacgcaaatttttcacatcgatttcaccagctgcccacccgtgcctcattaaattacccaccaagcctcacttgccggcaacttgttagttgtcctttttcacaactttttacatgcaaggtgttcagcgaaaagacagccgtcgtgtgacagcctctggtcccactaaggacattcgctaaaacgttgcgcctaattaatacaagactgccaacaatgcccatggtgaatgaagtggttgaccttaccctgaccaaaccgcgctcgccccgggactttttcaagcgtttgcaacgactctggctgggacttgcggtggttggcctgctgctggtgtgcagcctgttctggccggcgtcgccacgggacctgggcatcggcaaccgcctgctgacctcgcaagtgatgccgctgtggcgcgacggcgacctgatcgtactggtgcgccatgaggagcgttgcgatcgctccgccaacccgtgcctgggcccgatggaaggcctcacggtacacggcagccaacaggccgaaaagctcggcaacgcctttaaatccatggggatggacaccagcgatgtgctcgccagtcccgctatccgcacggcgcagaccctgcgtttcatgttcgacaaaaacgagctgacctcgggccaacaggccatctgcggcacggccatgggcgaggaattgctcagtcaaaagacccccggacgcaatctggtgttcgttacccacagcggttgcatcgccgacttcgaaaaaacccagggcttcccccatgccgcgttccccgaatacggcagcgcgttgttcgtgcaggcattgcccaacggcaagttgaagatcctgggcatcgtcaacaatccggattggcctgccgcgctaaaacagacccactaacttactccccgccctgttcagcaaaaagacagccctgttctggcatgtttagttgcgccttttaactaaggacgtcatgaatattttctgcaattgtgtgaacgctgtgattttttccactattacttcatcacttgaaacccacatctcagagcgtcagggagcgacgtttgcatgacccgactaaaacccctgccggtattactgctggccttcgttgcgttttacctgctgcccctgggcctgcatggtttgtggatcccggacgaaacccgctacgcccagatcagccaggagatgcttcaaaccggcaactgggtggcgccgcatttcatgggcatccgctatttcgaaaaacccgccggcggctactggttgattgccctgggccaggcggtgttcggccaaaacctgttcggcgtgcgcatcgcctcggcgctgaccaccggcttgagtgtgctgctggcctacttgatcgcccgtcgcctgtggaatgacccgcgcaaaagcttcgcctgtgccctgctctacctgagcttcggcctggtggccgggcaggcggggtattccaacctcgacccgcaattcaccttctgggtcaacctgagcctggtggcgctgtggtttgccctcgatagtgccacgctgcgcggccgcctctgggcctgggtcgtcgtgggcctggcctgcgccatggggttcatgaccaagggctttttggccttggcgctgccggtgctgattgccgtgccgtacatgctctggcagcgtcgcctgggtgagttgctgcgctatggcccgttggcgatggtggtcgcagtactggtgtgcctgccatgggcgctggccatccatcttcaggaaccggacttctggcgcttctttttctggaatgaacacattcgccgcttcagcgccgacaacgcgcagcatgtgcggccgtggtggttcttcctgccgatcatcgccgtgtccagcctgccgtgggccggtctgctgccaacgactctgcgcaagacctggcaggaaaaacgccagccggcgatcaccttcctggcgttgtggctgcttctgcccctgggcctgttcagcttgagccgaggcaagctgccgacctacatcatgccgtgcctgctgcccctggcactgctgatgggccatacgatgatcgacctggtcaagcagggcaaagcccgcacgatctgcctcaatggcctgttcaacttcgtgatcggcatggcggccatgatcggcctgatctacctgcaaatcgcccggccgctgtacagcaacagccacgccgagatgttcagcttgtccctggccttcatcgtgctgctggtgtggattctcaccaacctgctgcaagtgattcgcccactgacgctgtgggcaatgcctgcactgggcatcggcctgctggtgatcctgttgccggcgagcatgccgtcgtggattgccgacaacgaaatgcccgaccagtttgtgcttgaacacctggaagaactgcaacagacccaggcactgctgagcaatgaactggggagtgccagcgccctggcctggcgcctgaaacgaccagaagtatcgctgtatgacaccgagggcgaactgcgctacggcttgcaatacgcgggctcggtgcatcgcaaagtggaactggacggggtccaggcctggctcaaggaggcgcgccagcacggctcggtgggcgtgctgctgcgggtcaacagcaccagtgaaatgcgcgaagccgggcaactgccgccaggcggcaaacgctactacaagggttatctcgaattgatcatctacccgagcctgccctgatgacacccttctggaagaccgaacgcggcgccctgctgctgttgctgggcgtcaccgcgctgttgctgctcaccggcctcggcgcacgcgacctgtggggcccggagacccgctgggcgaacatcgccttgcagatgctacagagcggggactacttcgacccctacctcaagggcaccccctattacgacaagcctctgccctcctactggctgatcaccgccacggcccacctgatgggcggcctcgggccgtggtcactgcgcttgccctcggtgatcggtgcgtggctgagtgtgtggctggtctacctgctcggtgagcaactgatgcgcaagggcaccgggctgatcgccggctggatgctcgccaccaccttttactttctgttctgggcgcgggtggccacggcggatgtgctgacggtgtgcggcgtgctggcggccgtctggtggtactggcgcgggccggacgacacccggctgggtcgctacaccgtgttcttcctgttgctggccgtgacctcgctgttcaagggcttgatcggttttgtgctgccgggcctggtcctgctgccgcacctgctcggcgagcagcgctacaagcgccatctcaacctgcgcttgctacttgcgctgctaatcgccgccgcggtatatgccgtgccgttcgtgctctcgcatatctacggtgcgcccacctatgggcaaagcggcctggcgctggtgttccgcgaaaacgtggtgcgtttcttcgacccgttcgatcacatgggaccgatctacacctacctgatttacctgcccgcctacaccctgccgtggctgccgtgctggctgctcggcctgtggctggcgctgcggcactggcgccagaccccgcccaacgtgcgatggctggtgtggggcctgggcctgttgtttgtgttcttcaccgccagtggcagccggcgcagctactacgtgttgccgctggtgcccttcgcccagttgctcggcgcctggtggctcagcgaacgcctgcaggccaggcccgccagccggccgcgctggtacaaagggttcgcctgcgccgccgtgttgatgctgctggtcattggcgtggcctacccatggagcaacggcaatggcggcgtcacccgcttggccgaggatgtgcgcagcgaagcggtcaaacgcgcgccgtgggagcaatggcaactggtgctggtggaagtggacaacaaggtgccgatgtacctgcaaaacggtggcaagccgttctactacgtggccgagacccaggacttcccgcgccagggcgacagcgcagcgttcatggcctggttgcagaaaaccagcggcaaggccttcgacccgcagcgcacgatcatcgtcgcgcagtattccaaggacgacctgacgccgttggcgtacctgggcgcggatcaccaggtcatcaccacccagccggacaatggcgagcgtttgtttcaaaaacgtgagggtggcagcgtggcgttcgttccctggtccaaatagacggcggtcttatcccttcaggctggcggcatggataaatgcctcatccaggctttgggcgtcgtacgcgtccatgaagccttgcgcgtcagtgaaccggttgaatcgcctttggctcagcatataaaaatcatcgcaatgcgcgacgatctcatcgacgttatgtgatgaaaccaagaccgcgacaccctctgccgcagccccctccagacagcgccaaatgtgataacgaaactccggatccacacccgcagtgggctcatccagtatcaccaggtccgcgttggcacaaagcaacgacaacgtaaaaaaccagcgtttctctccatagctgcagagcgcagattttttgttccagatctcgcagtaccgctcggcgatgccggggctccatttttcgattttatcgagtgcatgttgttgggtgacctgggtgtcggagcaaaacagcatggccattttgaagatgtcgaacatgcgaaatacagggggtgtgctgatgacctgcgacaggtacagcagcttggagaaggagctgcttatttcaccaccctccactttcttcaggccgcacagtacgtcaaaaaacgtcgttttaccggagccgtttgggccgagaaggcctgatatggagccggccatggctgtcagagaagccttgctgaacactacatggcctgggtaactgaccccgagtgagctgacgataagtttcttcattagtatcggctccagactgggtttatgagcaataaccgaaaggtcacgccaaaggaaatagaaaaggccaccatgacaaccagcatgacttctatcgatcccacgaccccctctagcattatttgattagcccatctcattggatttaacagcttgatgacttcgagggcagtatgagatgtactggcactgacaattccaagcgccaacatcaaacacaacaagacagaaaaaacagtactggcattttgaaaacttaatggagccaatgtaagcaacagcgaaaatatagagaacaagagaaagcagatataaaatctcgacgcaacatcccacacctccgacacttccactcccgccccaaaataaagtttcgtcagaccgtagaaaaccatgcagtaaactatcgacaagatggaacaagcaaaaaactgcccaaacagaaagaccagcttagtcggtttagcgtagacaaatgaacgcaagaagccactttctctgcgcccgacgatataaaacgccaggccgaaaaacgctacgctacaggcaataaaggcatagaaccaagatgtaacggctagataattgatcgtccgatcgtcatcgggcgtcctcgcataggtgatcaaatagaacgtcaccgcgggagaaactaccatccagaacagtgcaaccggttccttcaactgttccttgataaacaatgctgccagtaaaaagggtttggacaatagataaccgctcatgacttacctcgcaggaagcgtgaccgactctccatcaaaacttagcgtatctggaagaacattcaagatagcctacttttaacaggctcatgaacatgagaaatttcactcataaaaatcagacattcaataattgcatacgacgatttttttcgacccctcccacagcacatcaaaaccctcaacaagattagtaacttactgaacacactacaaaaacaatcagatgccttattacttaacatataccgaactgttgtaattttttttcagaaaaaaacgacaagcggcattgatctgcgatgcgccccctttggtctcgtagcagtaggcatcactcactgcgccatacacccgcaatcaagtatccggattgatcctgcttttgcgctccgcatcggcctcgcccgtgtccatccgcaaacccgccacctgcgcctgcaccgcccgcccctccgcccggttgcggatgaaaccggcccgggtgaaccgttccagaaacggcaccggcaaggctttgtcggcggttaccgcaggttgttcagccacatcgccaaacaaggtgtacgccgcactcggcaagtgccgggtgttgaggtcgctggtcagtcggcccgcttgcaggacgatagcgcggttggtcacccgttgcaggtcagacaagcgttgggaaatatagaggatcgccacgccccgggcgcgctggctgtcgatcaggccgagcaggcgttcggcgtcggtttccgacagggcggcggtgggttcgtcgaggatcagcaacctgggttgcagggcaaaggcccgggccagtaccagcagttggcgctcggcctggccaaggcgttccaccgggtgttgcagcggcaggtccaggcccagcccggcggcgatggcttcggcgcgttgcagcaggcttttgcggttgagcagaaaatccgcatcgggttgacccagttcatccagcaacaggttctcggccacactcaggccaggggcgatggcgtcgtcggggtcttggtgcaccgccacgatgccaacccgccgcgccgacaacggcgaggcaaagcgttggcgctgcccatcgacccacacctcaccggcatccgccgccaggctgccgctgaggatcttcaccagcgtcgacttgcccgcccccgtggcaccgagcaacgccacgccctcgcccgggtaaatatccaggctgacctgatccagcgcccgttgggcaccaaaggtcttgcacaggcccagcaggcggatcaggggctcgggggcaaccgggttgctcatggctaatctctaaggcggaacgatgactcattacaacgtgcgaacacgctgatttattccgaacaacaatgagttaggccccggattaaatgcattacctcaagaacaatccaatagctgaatcgcatagccaaatttttttgagttataaggcagttatttgcagcttgaggaatgcgttcagcaaagcaaccctgtggaccacagggacggcaacggcatcgttgagcgggacggctagtggcatttggtcatgctttgtaaagggccagcaaggcgtgtcgcttttaattgcaggacgtttcctagacaatctccgccgccttgtgcctgccggaatcggtggctagtctgcggtccgtcactggttttcagtgatcgggtttagtcgcccggaatgacacaaggcgcatggtcacatgaagttttatggtggctgtgcgcagggcaccttcgggtgcgccggatttccttgtggccggtcgactaacctgcgtacagccgccacccatcgtttagtcgcgccaggtgttggctcctattcacacaaggaactacaccatgaacaaagccctacccgacccaccgcaagacctcaccaaagaccgcgccgccttcaaccgcgccattgaccattacctgccgtcacaggggctccacgccctccacgaagacctgagcttcgaagacgccctgctctacaccgccagtttgctcgacagcgcatccactaccgcgctggattgtggcgagacactgagcaaccccgaacgggcgagaatcctggcggtctggcatttgctggagatcgccaaggcgacagtagatcgctccatcgagtgcctgaaacctgcgcctgcgactgcctgaacacggtcctacaaagcagcttacctatgtgcgtgagctgacttggtgagtcatcccgacaagagtgctttggttgctttcgactgggcaggcattctgtggcgagcgggcttgccccgcgttggagtgcgtagcgctcccagcttttttggggctgctacgcaacccaacgcgggacaagcccgctcgccacagttgcagtgttcgcccttgatggaatggtatcagccagatacttgaaagggctggccataagggcgtaaccctaagcagcggttacctaaataacggatatgcccccgtcaaatccgccgccgccgccccaactgcggaatagccgcctgaggcacctccacccgctgaacctgcgtcaacacacaccccgccaattgcgccaccgtcggatgactgaacaacgcccgcgcatccacctccacccccgccttgcgcatccgcgccaccaggttcaccgccaacaacgaatgcccccccagctcaaagaaatgatcgtgccgccccacccgctccaacttcagcacctcagcccagatcccggccatcaacacctccaccgccccgaccggcgccgcataggcgcggctcaccaccgcccccaaccccggctccggcaacgccttgcggtcaagtttgcccgccggattgagcggcaacgcgtcaagctgcacaaacgccgccggcaccatgtattccggtaattgctccagcacatgggcgcgcaacgcatccgggctcggcgcctcgccacgcacggtgaaatacgccaccaggcgttcatcgcgaatcaataccgccacctctcgcaacgccggatgcaccagcagccgtgactcgatctcccccagctccaggcgcacaccgcgaagtttgacctggaagtcgttacgcccgaggaactccagattgccgtcaggcaggtaacgcaccaggtcgccagtgcgatacagccgatcaccggccacgaacgggctgtcgataaagcgctcggcggtcatctgctccagccccaggtaaccccgggccacgccgacgccaccgatatgcaactgaccgctcacgcccatcggcaccggcgcatcgtgttcatccagcacatacaggcgtgtgttgttgatcgcccgcccaatcggcaactgcaatgccggcaccggcgcgccgggttccagggtccaggcgctgctgtccactgtggcttcagtgggaccgtagacgttatgcaggcgcaccttgggcaagcgcgcctgcacgccacgggccagggcttcggtgagttcgccgccgccgcacaacacatcggtgaggctgctgcacagcgcggactcttccagctcaaggaactgctgcaacatcgccggcacgaacttgatcaccgtgatctgctgctcacgtatcacctgcgccaggtaggccggttcgcgatggccgtcgggccgtgccagcaccaggcgcatgccgttggtgagcggccagaacagctcccacaccgaaccgtcgaagctgaacggtgcccgctgcaacagcgcgccgccctcggcattggggcacagctgcgagccccagtgcatcaggttgccgaggccacggtgttcgatcatcacgcccttgggtgtgccggtggagccggaggtgtacatcacataggccaggttggccacgctcagccccggcaccaacgggttgccgacaggtgcctggctccaggcgcagtggtcgaagtcgatcaccgggatcgacacgtcacccggcacgtcacgggtggcggcatgtaccagcagcgccaccggctggctgtcgtggagcatgtaggccaggcgctcgcgcgggtagcccggatccagcggcacataggcaccgccggccttgaggatggccaacaggcccaccaccagctccagcccgcgttcgacgcacagcgcgacgcgggcgtccggttgcacaccgcgctcacgcaggtggaaggccagttggttggcgcgttcattgagttcgcggtaggtcagttgcaactcgccggcctgcacggcgatggcatgggggatatgccgtgcgtgggcttcgaaccgcgcctgcaccgtgaaagtgtcggggtagtcggtgtcggtagcgttgaagtccaccagcagggttttcagctcgccggcgggcagtacctggacgtcgcgcaacggtgtctgtggcgcctggtccagcgtgtccgccaagttgatcagtgtgttttcaaggtagtcgagcagccgaccggcgccaatttgctgcggcgccttggccttgatccggaaacccttggccgtgtcgtccacggtcagcatcagcgggtagctgaggatgtcctcactgctgagcaaggcaatgcccggcaccagggtcaggtcacgctcggcgtcggtgtgccggtagttgagcaggctgttgaacaacggcgacgcgccgctgcaacgctgggccagcgcaagggaggcttgttcatggacgagcaaggcgctgagccgggcgtgggtgcaagtgagcgcatccgccaccgttcgcccggccaggcgcacccgcagcggcagggtgttgatgaacatgcccagggcgcggtcggcgccctcgcccgcctgcaaacggccgagcagcacggtaccgaagaccacgtcatcacggccggcgacacggctgagcacctgcgcccaggccaggtggaacaggctggcggtgctcacacccacgccacgcgccagggcacgcaaacgctgattgaggctgtcactcaagccacgttcggcttgttcggtgtgcgcccgatccgcctggcgctcctgtagaccgaaggccagggtcggctcgtcgacatcccccaactgctcgcgaaagaacgcctcgtgcgccgcttgacgtgccggcgaacgggcttgcaccaccacattgcgatacggcaccggcaccggcaactgcgcctgctggccgagcaagtgggcgcggatttcctgcatcaggatcgtggtggaggtggcgtcattgaccaggtgatggaaccgcagccgcgccacccaacgcgagtgctgcggctcttcggcatagtccagggccatcagcggcgcctggcgcaaatccagcggcgcgcacgcttcgcccagcggttcgacgcgcaattgcgcctggcgccacaccacctgcatcggttgctccagggcctcccacaccaggctggtgcgcaggatgtcgtggcggttgatcacctgttgcagggcctgggcaaatgcgtccaactgctcgcgctgcgcaaagctgaacagcgcctgttgctgataaggatcgcgttcatcggtgatgtggtggtagagcaagccttcctgcaacggcgccagcgggtagatgtcctgcacattggccgcgccgccggggatgcgcgcgacgataggcgccaggctggcggggtcgagttcggccagctccggcgcgtccacgtcactgagttcactcgccgccgccagggccgccagggtcggctggccgaacagcacctggacatcggcgcgcagcccgacctggcgcatgcgttgcaccaattgcacggccagcaatgaatgcccgcccagttcgaagaagtggtcgtggcgcccgacctgctgcacctgcaacagctcggcccagatctgcgcgagtacgctttccgcgccggcgtgcggtgcttcgtacaggcgggtgacgaatgcgtcttgggtgggtgtgggcagcgccttgcgatccagcttgccgttggcggtcagaggcaacacgtccagctgtacgtaggcggccggcagcatgtagtcgggcagcgacgcttgcaggtgggcgcgcagggcttcgatcggcaccgcttcacgcgggacgaaccaggccagcaactgcccttcgcgggcttgcaccacggcgtcctgaatgtgcgggtgagtggccaaggccgattcgatttcgcccagttcaatgcgcacgccacggattttcacctggtcgtcattgcgccccaggtattcaaggttgccgtccggcagccagcgcaccaggtcgccggtgcggtacatgcgcccttgggtgaaggggtcgtcgaggaaacgctcggcactgaggtcgggacgcttgagatacccgcgcgcgatgccgttgccgcccacgtacaactcccctgccacgccgatgggcagcggctgttgctgcgcgtccagcacgtacaccgtggcattgccgatgggtgcgccgatatgcaatggccggccgacagccatggggccagaggtggcgaccaccgtggcttcggtagggccatagttgttgatcacagcgaaggactgcgcctgggtgaacgcgcgcaagcggtcgccgccgatcagcagggtgcgcagtgtcgggtggtgcaggccctggctgaaggcgtactcggccacgggcgtcggcaggaagcacacgtccagcggctgcgcctgccaccaaccgagcagcgcgtcgatgtcttcggcgccgtcatgggccggcggcaggtgcagcgtggcgcccacgcacaacgccggccagacctcccaggccatcgcgtcaaaaccaaaaccggcaacgctggcggtgtggctgccggcatgcaggtcgaaggcccggcagtgccagtccaccaggttcgagacgctgtggtgctcgaccattacacccttgggcaaaccggtggagcccgaggtgtagatcacataggcgaggtgggaggggctgaccgctacgcgggggttggtgcccaggtggaaggtcgggcggtcaagctgaatcaccggcaccgtcaagggcggcaaccgatgcagcaaatcgtgctgggtcagcaccactaccgggtcgctgtcgtgcagcaagtaattcaggcgctcggcgggatgggccgggtccaccggcacgtagcaggcgccagacttgaggaccgccagcaaccccaccaacgtgtccagcccacgccgcgccaggatcaccacccggtcgtccggccgcacgccgctctccagcagttgatgggccagcgcgttggcctgctggttgagttgggcgtagctcaggtgccgcccctgatacaccgccgccacggcgtccggcgcgcgcgcagcctgggcttcgatgcgcgcgtgtagggtctgcggcggcgtgacgggctgggtggtggcgttccattgttgcaaccgcgcctgttcggcgggtgtcaccagggagaaatcgcggatcgtcagcgcggtgtctgccagcccctgctccagcagccaggtaaaacgttgcgccagggccgccacttcatcgtgctggaagtacgcctcgttgtagacgcaatgcaggcacgcggtgtcctggtagcgattgctgcgcaggtggatggccagcggcagcggctcgtggtggttggacaccttgactgcacgggccactgttgtgccgtagcgcagttcatggtcgtcctgctcgaaggacaccgacaggtcgaacagctggccgcggtcgctgcgacgcaggcccagctcgcggttcatctcgctcagagggaaacgctggtggcggaaatcctgcttgagctggtcgcgcaccccacgcaccaacgcgctgaacggcaactgctcatcaaactgcaagcgcacggcactgacctgggtgaacagcccaacggtggagcggaaccgcgcattggaacggttgagaatcggcaaccccacgacccactcctggcgttgggcggtgcgggtgaaatacacatacagcgccgccagcagcacatgaaacgccgacgcctggtaacggttggccacctgttccatgcggttgagcagtgccaccggaaacgcctgcgccagggtattgctcgtggccttggccgtgtgtcgcggggtcaacagcggctcgggaatcagccggtacttgcccagccaataggcgcggtcgcgggcataacgggcggacgcgtggtagtgctggtctgcgtcgataaagtcgatgtaggacggcgccggcgactccgcttgccggccttgcaccagggcggtgtacagctgcgcgagggattgcagcatctggccgaagccccagccgtcgaggatcaggtggtgggcctgggtgccgaggcgatagtggtcgtcgtcgagcttgaccaggaaaaagcggaacagcggcgcgccctgcatcgcataaggccgggccatttgcgcctgcatcagggcgtggctcgcggcctgcggatcagcacaagctgacacgtcatgccgcgccagttccacagccaacgtcgcagcgaaagtctggcgaggcaggccgtcggcgtcgctgtgcagttgggtgcgcaacgcgtcgtgcctggcgaccagaagttcgacagcgcgctgcatcaggccggggtcgatggcgccggcaaagtccacataaccaccgatgttgtacagcggcgagtcgcctgcgcgcagttggtcgagccagatgtcctgctgggcggcggtgagggggaagctgggtgaatgcttcataagatccttctcatggaggtcaggcactggccgcgcaggggtgcccattacgacgaatgggccggattggagcatgggggccaggggctgtctgtcaccctaaacccggacattcaaatggatagaccaggcttggctgatggttcactgctgaaacgattaaagagttgtaggacattggctatatttggccgatgccggtttgaattgaacatttcaaaaaatatatttttatcttatttatcatagagttaattaaccctaaaaaatccgcttggtgactcgtagtcggaattacctctcagaaacgtcgaattaatgacgcggtttctatggcaggttgtgtccctcgtttccgctacatacgtaggacaaatccactggctaaatacactttcgaataccgactctggtgtgtgagcaacggatcgcccccgcagaggcccagagcgtctgtacacggttttcgatatcaaggatgagaaggctatgagtttgaccagcagtattgccaacacccaaagcccgcatttctacgctgaaatgggcgagttgattgccagcagtggccacccgggctttgccgcccacatgctgcacctggtggacaagtgggtgccgatccacctggtggatctgagcgaatggaccctcgacgagctgcgcgaccgtgtgctcgatatcacgctgctgggcagcgccggccagacgcaggacctgccgcctctggccctgaattccatggacgaccacccgctgctgcgtgagatgctcggcatgcaggacccgctgctcatacagttgaaggccaaggccaacagcgctcacccgcgcggcacctcgcaccagtgcaacctggtgtcgcgccagggcaaccggcgctgtgtgatttcgttttatcgcccgccgacccagcgcgggttttccctggccgagttgtcgtttctcaagtgcctgtcggacacgctgctgccgctgatcgagtgccacgcccagagcctgcgccaggcaccgcacaccgaggtcgaaccggcccacacgttgctggagcagtcgcaattgcaacgtgagttctacaaacgcctgtccctgggcgacatcacgttgtcggcgcgcgagcaggaggtgtgcctcggcttgctgaccggtggcaccgtgccgcagatcgcggagaaactcagcgtgaagaacagctccatcgagacctacctcaagcgcgccgccgccaagttgggcgtgagtggccggcacggtctggccaagtggatggtgggcgcctgatgcataaattgagcaccttcgcgatggcctggatgctcggcggctgctcgctgatcccggactaccaacggcctgcggcgcccgtgcctgcgcagtatccccaggctggcgtgtatgcgctggcgcaggccggcacgtcggactggcagcagctgttccacgacccggcgctgcaagggttgattggcgatgcgctggtcaataaccgcgacttgcgcgtggccgcgctgaacgtcgaggcgttccaggcgcagtaccgtatccagcgtgccgacctgttcccggccgtgtcggcgaccggcgccgggcagcgccggcgtgtgccgggcgacgtgaccggcacgggcaaggccgccatcacctccagctattccgcgaccctgggcatcagcgcctacgagctggacctgttcggccgcatccgcagcctcagcgaacaggccatgctcacctacctgggcaccgaagaggcgcggcgcactgcacagctgagcctggtcgccaacgtcgccaatgcctacctgacctggcgcgccgaccaggaactgctggccctggcccggcaaaccctggtggccaacgaacacagcctgcgcctcaccggccgcagtaaaaccgccggcaaagcctcggcgctggacgtggtgcaagccaccaccagcgtcgaaagcacccgcgccagcgtggcccgctatgagcgccaggtcgcccaggacctcaacaacctcgccctgctggtaggcggtccggtggacgaacagctgccgtcgcgtccacttgccgccgacctggtggcgcgcgtaccggccggcctgccctcggacttgctgcaacgccgcccggatatcctccaggccgaataccagttgcgcgccgccaacgccaatatcggtgcggcccgcgcagcgtttttcccgtcggtgagcctgaccgccaacgccggcagcgccagcaccgaactgtcggggctgttcaagggcggctcgggcagttggacgttccagccgcagatcaacctgccgatcttcaacgccggcagcctgcgcgccagccttgactacgccaaactgcaaaaagacatcagcgtggcgcagtacgaaaaatccatccagaccgccttccaggaagttgccgatggtctggcggcgcggcaaacctataccgaccagttgcaggcgcagcgggatttcgtcgcggccaaccagcagtattacaacctggccgagcatcgctaccgcagtggcgtcgacagcaacctcaccttcctggatgcgcagcgtgcgttgttcagttcgcaacaagcgttgatcgtcgaccgcctggcgcaactggtggcggaggtgaagttgtacacggcgctgggcggcgcgtggaacgtcagtgcaagcccgactgccgcagccgatactcccccggcgtcacctgcgcataccgaaggaaaaaccggctgaaatacgccgggtccttgaagcccaactggtagcagatttcgttggcggaactgccggtgaacagcaacaagcgcttggcttcctgcatcacacgttccaggatcaggcgcttggacggcaggtcggccaggcgccggcacacctcattgaggcgcgcctcggtcacgccaatcccctcggcatagcgcgacagcggccagtgctccagatagtgggcctcgatcaattcgttgaagcgatggaagatgcgcaggtcttcgtgccgggtcgggcgcgccggcagtgagtgggcgcacaggcgcagcaggcgaatcatgatcaggcgcgtgaggctgtccaatgcggcggcgcgccctgcccgcgcggcgttgatctcatcgttgagttcttcgaacagttgatccaggccgtggtcacccgccgtcagcgccacgcaggccgcgccggaagccaggctggggtcggcgtcgatcagtccccacaccaactgctggcgcaccgtcagcacatgcccatcggcatccgcctcggtgacaaaggcgtggggcaccgtgggcggcgtgaggaagaacatcggcccggactccacgaactggcggtcatccaggtacacccgcaccgcgccgctcttcacgtaatgcacctggaaaaaccggtcatgccgatgcacgggcatgttgcgcccgaaaaatcccgccaggttgccgagcttgtcgtaatgcacctcggcatcgctgtaacgctggtcgtagacctgcccgatgttgatgttggggatcggcttcacggtgccctcttcttgttgttatgacgccagaggattttgccacgcttgacggtagttaacatattaattataacgttaacacattaacgaactgcctatgcagcagtcgccaccgccaggagaaacgcatgagccgtaccctgcatgatgttgccagcggcaccctgttcggcgtcgcgctgaactaccagggcctgctggaccagcatctcgccgccttccagcaggcgccctaccagaagccgccgagcaagccggtgctgtttatcaagaccccgaatacgcgcaacgagcacgctggcgtggtgctgcaccccgagggtgaacgcctgcaacccggccccgcgttaggcgtggtaatcggccagcgcgccagtcgtgtcagcctggaaaacgccatggcccatgtggccggctatgtggtggtgaatgaattcagcctgccggaagacagctactaccgcccggccatcaaagccaaatgccgcgatggtttttgcgtcctcgggccacagttagtcccacgggaccagctcgccaaccccggtcaactgagcctcaagatgtgggtcaacggcgaactgcgccaggaaaacaccacggccaattgggtgcgcgatatcccgcaactgatcgccgaaatcagcgaattcatgaccctgcatcccggcgatgtgttgatcaccggcacccccgaagggcgcgtcgatgtgctgccgggcgacagggtagaagtcgagatcagcggcgtgggccgtctgctcaatcacattcaagcggagaccccagcatgaaacacgcccgtatccgctttgaaggtgaagtgcacgccgtacaggtgcaagccgacaacaccgtgcgtttgagcgatggtcgcctgctcgtcgaagaccaggtgcagtggctgccaccggccaccggcaacatgttcgccctgggcttgaactacgccgaccatgcggccgaactggccttcaccccacccaccgaacccctggccttcatcaagtccgtcggcacctacaccggccaccgccaggtcacctggcgcccggacaacgtcgcctacatgcattacgagtgcgagttggtggcggtgatcggcaaggccgcgcgcaacgtcaagcgcgccgacgccctggcctacctgtccggctacacggtgtgcaacgactacgcgatccgcgactacctggaaaactactaccgccccaacctgcgcgtgaaaaaccgcgacgccaccaccccggtcggcccgtggatcgttgatgtggccgatgtgcccgaccccggcaacctgaccctgcgcacctgggtcaacggtgagctgcgtcaggaaggcagcacccgcgacatgatcttcgacatcccctacctcatcgaatacctgtccagtttcatgaccctgcaacccggcgacatgatcgccaccggcacgcccgaaggcctggccgatgtggtgcccggcgatgaagtggtggtggaagtcgaaggcgtgggccgtctggtcaaccgaattgtcagcgaggcggagtttttctccgcccggaaagaggcgtgagcagcatgatcaaacactggatcaacggccgtgaggtcgaaagcaaagacaccttcatcaactacaacccggccaccggcgaggcgattggcgaagtcgccagcggcggtgccgaggaagtggcccaggccgtagcggccgccaaagacgcgttcccgaagtgggccagcaccccggccaaggaacgcgcacgcctgatgcgcaagctcggcgaactgatcgaacagaacgtgccgcacctggccgaactggagaccctggacaccggcctgccgatccaccagaccaagaatgtgttgattccccgggcgtcgcacaactttgatttcttcgcagaagtctgcacgcgcatggatggccacagctacccggtggacgaccagatgctcaactacaccctctaccagccggtgggcgtgtgcgggctggtgtcaccgtggaatgtgccgttcatgaccgccacctggaagaccgcgccgtgcctggccttgggtaatacggcggtgttgaagatgtcggaactgtcgccgctgaccgccaatgaactggggcgcctggcggtggaagccgggattcccaacggtgtgctcaacgtgatccagggctatggcgccacggccggtgacgcgctggtgcggcacccggatgtgcgcgccatttcgtttaccggcggcaccgccaccggcaagaagatcatgcagaccgccggcctgaaaaagtactccatggaactgggcggcaagtcgccggtgctgatctttgaagatgccgagcttgagcgcgccctcgatgcggcgctgttcaccatcttctccctgaatggcgaacgttgcaccgccggcagccgcatctttatccaggaaagtgtctacccgcagtttgtcgccgagttcgccgcccgcgccaagcgcttgatcgtcggtgacccgcaggatccgaagacccaggtcggctcgatgatcacccaggcgcattacggcaaggtcactggctacatcaagatcggcatcgaggaaggcgccaccctgctcgccggtggtctggaacgcccggccaacctgccggcgcacctgagcaaaggccagttcatccagccgaccgtgtttgccgatgtgaacaacaagatgcgcatcgcccaggaagaaatcttcggcccggtggtgtgcctgatccccttcaaggacgaagccgaggccctgcaactggccaacgacaccgagtacggcctggcctcctacatctggacccaggacatcggcaaggcccatcgcctggcgcgcgggatcgaagccggcatggtatttatcaacagccagaacgtgcgcgacctgcgccagccgtttggcggggtgaaaggttccggcaccgggcgtgaaggcggccagtacagcttcgaagtgtttgccgagatcaagaacgtgtgcatttccatgggcagccatcacattccgcgttggggtgtttaacccccgccaaggcgctccaacaacaataatgaacctggagaatcatcatgggcgaagtggtcctggcagcgaagatctgccacgtgccgtcgatgtacctgtcggaactgcccggcaagcatcacggctgtcgcgaagcggcgattgccggtcacaaggagatcggccgccgcgcccgcgaactgggcgccgacacggcagtggtgttcgacgtgcactggctggtcaacagcggttaccacgtcaattgcggcgagcggttccagggcacctacaccagcaacgagctgccgcacttcatcaagaacatggagtacgcctaccccggttgtcccgagctgggcgcgttgatcgccgccgaggccaacctggccggcgtgcgcagcatggcccacaacatcccgagcctggagctggaatacggcaccctggtgcccatgcgctacatgcacatggacgtgccggaggctgagacattcaaggtcatttccatcgccgcctggtgcgcctggcaccgcctggaagacagcttcgcattcggtgccgccgtgcgccgggccatcgagaagagtgaccgcaaggtactggtgctggcctcgggctcgctgtcgcaccgcttttcggacgaccgccaggccgaggcgaatatccacacctggacccgcgaattcgacaagcaagtggacctgcacgtggtggagatgtggaagcaaggccgcttcaaggagttctgcgcgatgctgccggactacgccgagcactgcttcggcgaaggcaagatgcacgacaccgcgatgctcctggggctactcggcgggccggattacgccaagccggcggagatcatcacaccgccgttcggcagttcgggcaccggccagatcaatgcgattttccccctgtagaaccgggagcaacccatgccgcactttatcgccgagtacaccgacaacctcgaaccacaggccgacctgcccggcctgtttgaaaagatccaccgcgtgctgggcgacagtggcgtgttccccctcggcggtattcgcagccgtggcgtacgcctggacacctggcgcatggccgatggcaagcacgactacgcctttgtacacatgaccctcaaggtcggccatggccgcgacctggccacgcgccaggcggtggccgaagcggtgttcgcggtgatcaacgcgcactttgccgagttgcaggcgcaacgtttgctggcgctgtcattcgagatggtcgagctgcatccgcaactcaatttcaaacagaacaatgtgcatgcgttcctgaataacccggcggggtaaacccgctgttctccccacggcctctcagacaaaaagtacaacatcatgagcacagcccactccaccgccagccgcgtgctggccgagcacgaccgtacccatcgttcagtgacgtggcgcctgatgccgctgttgctggtgtgttacctgttcgcccacctggaccgcatcaacatcggcttcgccaagatgcagatgagcagcgacctgcagttcagcgacacggtctatggcttcggcgctgggctgtttttcatcgcctatgcgctgttcggggtgccgagcaacatggccctggaccgcgtcggccccaggcgctggatcgccagcctgatggtggtgtggggcctgttgtccactggcatgttgtgggtggagagcgcccgtggtttctacgtgctgcgctttttgctgggggtggccgaggccgggtttttcccggggatcctggtgtttctcaaccgctggtacccggcacgccgtcgcggccaggtcaccgcgttatttgccatcgccgtgcccatggcaggggtgttgggcgggccgttgtccggggcgatcctggaacacttccacgatgtcggcggaatgcgtggctggcagtggatgttcctgatcgaaggcctgcccgtggtgctgctggggctggtggtgctcaagtggttgccggacggcttcgacgcggtgcactggctgaccgccgagcaaaaacaccagttgcgcgaccaactgcgcagcgaggaacagcgcaagaccatcacctcgttcggcggcatcctgcgcgacccgcaggtatggctgctggtggcggtgtatttcgcggtgatgctggcggtgaacacccttgcgttctggatgcccacgctgatccatggcgccggcatcggccgcgacagccaggtcggcctgctcagtgccgtgccgtacctggccggatgtttcttcatgatcggctgcgggcgttcctccgaccgccatcgcgaacgccgctggcacctgtgcgtgccactgctgatggcggcggtcgggatcgccgtggcgggcctggcgccgggcaatccgctgctggtgatgggcgggctggtgctggccggcatgggcgccagtgccgccctgccgatgttctggcaactgccgccggcgtatctgtccaccaccacccaggccgccggcatcgccatgatcagctcgttcggcagcgttgccgcgttcctcgcgccgtacctgatcggctggatgcgcgacgccacccagagcgccagcctggcgctgtacgtactcgccttgttcatcgccctcggcggcctgctggtgctgcgcacccacgccgccatcgtcaacccacattaaggaccgttgccatgctcaccccccagcaaattctccaggccgctgcgcacctggaccgcgccgaacgcagccgcgaacaggtgcgccagttttccctcgactaccccggcatcaccctcgacgacgcctacgccatccagcgcgcctgggtcgcgcaaaagatcaaggacgggcgcaccctgaagggccacaagatcggcctcacatcgcgggccatgcaggtctcgtcgaacatcaccgagccggactacggcgccctgctcgatgacatgtttttcgacgaaggcagcgacattcccttcgaacgcttcatcgtgccgcgagtggaagtggagctggcgtttatcctcggcaaaccgctcaagggccccaactgcacggtgttcgatgtgctcgacgccaccgagtgggtgatcccggcgctggagatcatcgacgcgcgcatccagcaggtcgacccgcagaccaacgcgacgcgcaaggtgttcgacaccatctccgacaacgccgccaatgctggcgtggtgctgggcggccgtgccgtgcggccgaccgagatcgacctgcgcaaggtgccggcggtgctgtaccgcaatggcgtgatcgaagagtccggcgtgtcggccgccgtgctcaaccacccggccaagggcgtggcctggctggcgaacaaactggcaccctatgacgtgaccctgctgccggggcaagtgatcctcggcggctccttcacccgcccggtcgcggcccgccctggcgacacgttccatgtcgactacgacctgcttgggtcgattgcctgccgcttcgtctgaaccctggaggattgccatggacctgcccatcaaccgcttcaaacaccgcctgcacagcggcgaggtgcagatcggcctgtggctcggcctggccgacgcctattgcgcagagttggccgccaatgccggtttcgactggctgctgatcgacggcgaacacgcgcccaatcacctgcaaggcatgctcggccagttgcaggccatcgcgccctaccccagccaggcgctgatccgcccggtaatcggcgacagtgcattgatcaagcaactgctggatatcggcgcccagacgctgctggtgcccatggtcgaaagcgccgcccaggcgcgtgagctggtgcgagcgatgcggtatccgccccagggcattcgcggtgtcggcagtgccctggcgcgggcgtcgcgctggaacagcattgccggttacctcgaccaggcggatgaacagatgtgtctgctggtgcagatcgaaaaccttgagggcctggcgaacctggacaagattgccgccgtcgagggcgtggacggtgtgtttatcggcccggcggatttgagtgcatcgatggggcatcgggggaatccggggcatccggatgtgcaggcggcgattgaggatgcgatcaagcgcatcgtgcagtcgggcaaggcggcggggattctcagcgcggatgaaaacctggcgcggcgctacattgagttgggcgcgacctttgtcgcggtgggagtggataccactgtgttgatgcgtgggttgcaggcgctggcaggcacattcaaaggcattcccgaggctgaccacagcggtggaatctactgaaatctcatgtgggagcgggcttgctcgcgaatgcagtggtacagccagcccattctctgactgacccaccgcattcgcgagcaagcccgctcccacattttgatcctcagtgttcgaggcgttgattcaacgcttgatattgatgttcttcaagtcatccagcagacccagcagggtctgcaacttctcttcgccaaactgatcctgcaaccgctggtagttggcctccatgcactggctcatcgactcgaaactcgccttgcccttgtcagccaacgtcaccagtacccggcgctggtcctgctcggccttgcgccggtgcaccatgccggcggtttccatgcgcaccagcacgccggtcatgctcggcttgaggatgcaggccagttccgccaattggtaaatctccagttcaccgtactgttcgaggatgcggatgatccgccattgctgttcggtcaggccgtgttcattcagggacgggcggaaaaaactcatggcggcttcgcgggcttgcagcaaggccagggtcagggattgtcgaggtttggacatagggatcagggtcacgaagtatttagttaataatttaacgaaactctaacattccctgccggcgagcgcgctataacttgtcgagtgcaccgcccatggcgcgctgaatcaaatgcatgggcacgcagggtcaagacttccatctcgccagggcccctaatggaggtatccgctttagagccttccttcacttttcaggctgcgccatgatcaacatcgaaacccccacgtattacaccgccaccaagaaatacaacttgagctttcccaccctggaacaggacatcgacgccgatgtggtggtgatcggcggcggtttttccggcatcaacacggccctggaactggcggaaaaaggcatcaccaatatcgtggtgcttgaagcgcgctacctgggtttcggcggcaccggtcgcaacggcgggcagatcatggcgggcatcggccatgacctggagaagatcaagaaggacgtgggcgaagacggcctgcgccaggtgttcgagatcagcgacctgggcgcggacatcatcaagaaccgcatcgccaagtacaacatcgacgcggacttctgccacggctacggctacatgggcttcaacgcccgccaggaaaaaaccctgcgcgcctgggaaaaggacttcaagtcgatcaacagccagcacgaaatccgctttctcggcggcgcggatgtgcaacagatcatcggttccaaggcctacagcagcgccctgctgcacatgggcggcgggcatgtgcactcgctcaacctgctgctgggcgaagccaccgcactggccggccatggcgtgcggattttcgagaacagcccggcgctggaagtcagctacggcgaacgcatcaccgtgcgcaccggccgtggctcggtacgcgccagcaaactgctgtgggcctgcgacagtttcctcaacaagctggagccggagctgcaccgttcgaccatcaacacctacgcgttccagatgatgaccgagccgttgtccgaggagctgatccagcgcatcagcccgattcggggggcctacagcgacattcgcccggtgatcgactactaccgggtgaccaacgaaaaccgcctgctgttcggcgccgcaacgccgttggtggagcatattcccggcgacctcaaggcctggaaccgtcacctcatgctgaagatcttcccctacctcaaggacgtgaaaatcgacctggcctggggcggcccgatggcgtgcagccccaacctgttcccgcagatcggcaccttgccggggcgcagcaacgcgtttttcgtgcagggctattccggttttggcgtgaccccgagccacatcatctgcaaggtcctggccgaaggcatgagcgaaggctcggcgcgctacgacctggtcagctcgattcatcgcccgaccatcatcggcaaggacgcgatccgccccttgctgctgacggcgggcaaatcctggcaccagctttccggctattggaacgggcgccgctaaccgcattttttactcaactggagaactgccatgcccctcacccccctcaagcacaacgtccaactctcggaactcgaaccttggggcaccgtggccgacctcggctccgagatcctcgaaggtgacgtgcgcgccttcggcaagatgacgttcggcgcgcccaccgacccggtcagcagcgcttatttcggtaccacccagggcaagttccgcatggtttatccgtttgctgaacaagccacggtggtcactggggaagtgctgctgaccgacgaatccacgggccacacctcgcgctacaaagccggtgacagctggttcgtgaccaaaggcacgcccgtgctgtgggaagtgctcagcgaaagcttcgtcaaacattacttcgccgtcgtgtaagggaggggttgccatgacgagttctcccgactggattaccgtcggcgcactggccgacggtttcgctccagacgccttcatcctgcccaacctggccgagctggcgggccaggcgttcaccctgcatttcgccaatggctggcagatcgagcaccgtttcgagcagcaccgcctggcctggcacgccgccgatggccactccagcggcagcgcaccgtaccgcgccacctcgattcgcccgggcctgtacctggtggatttcatcaagcacgaggccgggcatagctggtcgatcagcctggtgctggacacaccaaacgcctcgttcactgccgtgatcgggcgcctgccggaccaggccgagacccacgaaggcctctaccaccgtgccctggccggcaagccgctaacctcggtggaagtcgacttcctccacggcagcctcgaccgcccgtggcaggccggccactgccggcatgcgcccaccgaggaactggtgggcctgcgcaaccaataccgctacagccccagcgaggtctacgagcacatctacctcaacgagcggttctatgcctggcaatgcctcaaaggcgtggagcaaggcctgtgcgacaccgaccgctgtcactactacaagatcgccgaacagctgtacctgttcgtgtggcaggagaagatcgtgccgaccctcggcctggtgctgatcgacctgcagcagcaccgcagcgacggcaagatcttcggctatgccggtgcgtctttcgatgcgctgtcgaatttccccatcagctcgtattgccaggtgctcaaccgcacggagtatcccgatgactgagccgcgcacggtctaaatgtgggagggggcttgcccccgatagcnnnnnnnnnnnnnnnnnnnnnnnnnnnnnnnnnnngctatcgggggcaagccccctcccacatttgatctcctttgttttgaagatcccgtttatgcccccaccgcctgcatccggcttgaacggaaatccttcggcgacacctcgaactgcttcttgaacgaccggctgaagtgcgccgagtcggtaaagccccacttgtaggcaatcgaggtgatcgactcgctgcgcaggcacgggttggtcaagtcatctgcgctgcgcttgagccgcgcgcgctggatgtagcggcacacgctatcgtcctgttcttcgaacagacggtacaggtggcgcaccgagatattcagccggttggccaggccgatcgggctgagccccggctggctcagggattcatcgatgaccttctgcacgtagctgcgcaggttgctgccctgcagcgctgccaggccgtcgcggcactcttcgccctgctccagggccgatcccagcagcgacacgaaagccatctgcaacgcctccacttcacccgcgccgtctgcggtggcgtccttgcacagttgatccatcagcacatgcagcatgcgcccgcaggctttggtcgaggagatcttgccgaaagcccgtgcgtcgccgcccaggtgcttgcacacctgcggccgcgagagtgacagcgaggcgtgttcgatcaggccgaagggggtgatttcgatggagcccaccgagtccatcaacagcatctcgccaggcgccagttgcagggtctggccgttctgcgcgatctgcgaatagccgctgcgttggctgaccaggaaacagtcctggtcgttgtcatggtcggcgtggtgcgccgggcgtttgatcagcccggcattggtgcgcaggatggccacgccgcgcggcaagtctcggatctcgccgatgaacagcgagtggttgaacgccagttccgtctcgaaataaccgcacgcggcgcgtagctcgcggttccaagtgtccagcccgtcgtgtgcatgctgtgggatgctcatggggtgtctccgcaatggcttctttttgttgttctgatgcaatagttaacatgttatctatatgcacgcaacaacaacctgtgtgcccattgcgcaagcactaatgatgccaatcagaggttcgacaacacccgattcaacccgaccagcgccgcgagcaaatgactgcgctgcaccgcgctcagggcgatataacgccgaaacgccggcaggcgattgaccacctcgctgccgcccatatgctccaggcgcacgcaccattgctggtcgtgcagctcgatgcgcagacgcttgaaatccagcggcatcagcgcctggaacaacgcctcatcggccaacaagcgtgcctgcaactcacggcccaatgcctggttgccggcacggcgctgcacacgaattccatggcgccggatcgcgccgccatggtgcaccgcgaaactcgccgtgccgcccgtcgcagtcggtacgcgcaggacaaactcggtcagcaccaggtgcatcaacaactgcgactcggtgcgctcgacaatctcgaacgccacgccgtccacttcaagcgttgccagcccaaggttgcgccgcaggtgcgccagggtcacccccggtcgataccccgacggtgcacgatcggcacgccacagctcaaacagtctttgccgcaaagtcgccataaccgtcatcagcctgctccggttggttactgaactcctttgccaatacctcctccacagaggccggcttgaaggggttgaccttctgcaccaccagggtccagaacagtgcatacgccgccgtaccggccagcatcacgccaaacggcacatagatgtccgccggggtcatgcccggtggcgtgatgaaccacatgcccagcaggatgccgatgctcgacacgatctgcggcagcgggaaccacggcgagcgataggcccgtggcaagtccggccgccgaatacgcaggctcaccaccgagatcgtcaccagcaggtaggcaaagctccacgcacacaccgctgccagcaccaggtgcatgatgttgtcggtgttgccacccaggtacagcgcgtgaaggcagggaatcagcatcgccaccaagatgcacagcagcggcgtcttgaaacgtgggtgcaggtaggtgaaaaccttgggcaacgccccgtccaccgccatgccgtagagaatccgtggcacgccggccatcaaggtattgatggtggccgcgccggcaaacagaaaaccgatgcccagacacagcgggccgatctgccccatcacctgctcggcgaacctggggatggccatgggcgtgtccagcaggtgcacgcccgaggcggcatcgagcaccacgttttccacctggcgtttcatcgccgcgccatagatgaacatgcaggtggccacacccatcagccccagcatcatcgcgcgcggcatcaccttggccgattggcgcaggtccggcgccagcggcgtgacgaactcgcaaccgacaaacatgaacatcgccatgcccaccagcgacagcacggtgatcaggtcggtgcccaccagcgactcaccgaaccagccttccaactgcacagcgggcgcggcgatcaagcccagtacgccaaacaccatcagggtggtccacatgccgaaggtgaggatgatttccgcccggccaaaagcactgacgccaaaggcgttcagcaccccaaagacgatcacgaaacccacgccgagcaaccatgacccacccgccgattccgccagggtgttcaagtgttcgaagttcaccagggccatgaccccggacaggatggtttcagcagtgccggcaaacacatgcacgatcaggtacgccgacaaggtgccggtgatcgcgaaaaaccgccccatgccgcaattgatgtagtcgtacaccgagccggtggtgggcaggatcgaggcggcctcggcaaaggtggtggcctgggccagcatcattaccacggcgatcagcatcgccagggcgaacgcactgccgccgatgccaaagcccatagtggcggtgaggatcaccgggctggccatgatcaggccaatggtgctggccaaggcggtggggaaacctaccgtaccccggttgaggtgcgcggtgagtcggtcgttgatcgacatggtggggtcctcgaagacggtttttttaatgtatcggtactctgcgccccactcgaattgatcgtcttgcccctgtctgccgccggttttgttgctccctgccacagcgggcggcgtggcggccagggtcaattgcctggcacgcagagaaaagactcaggcccccgccactcgccctaatgcgccctcactcttaaccaagctggggacaataacaatggagcacacactgaaaaatcgcggcctgcgccaggcggtcggcctggggattgcgctgctggtgggccaagcccaggcggtcgagctttacgccgatgccgacacccacgtcaccggcaacttccttgccgtgtacgggatgttcaacagcaagaagaactacgacgggcgcaacggcggttccacctggcgcgaggccttcatcaagtacggcctgagcgtcgaccagagcctgggccgctttggcggcgtgtatggcacggccaacctggtgagttccggcacctggggcgatggcgatgcctccggggtcaccacgggcaaggagcgcaccaccaagttcgacgaagcctttgccggctggcgctcgggcgagctgttcccggcgttgggcaaggacggcgtggacctgtcgttcggtcggcagatcatcatgctgggcgacggttttctcatcaacgacgacggccccaatctgggcaagggcgtgggtgacggcgagttcaaccgtggcggtgcctactacatcgccgcacgccatgccttcgacaagactgcggtgattcgcctcggcggcaaggacggcgtacatggcagcctgatgtggatcaagtccgacaaccccgcccaggccatgaccgaaatggccgccggcaccctggagtacagcgccgcgccgggcaccctggggctcacgtatattcatggaatcgatgtggacgagcgcttcgccagcgacgtgcagcgccagcgcaaaggcatgaacctgtacagcctgcgcggcgccggcaatgcaggtatcgacaacgcgcacttcgcctttgaactggcccgccagaaccgccgcgacagccagcagaacgccggctacgccgaagccggctacaccttcgccgacctgccctggtcgccggacttgacctaccgctacgcgcgctattcaaagaactgggacgcgatgttcgccggcttcaaccgcggctacggcacctgggtgcagggtgaagtggcgggcaactactccggcccctacaacaccaacacctccgtgcaacacgtggcgctcaaggtcaagccactggagaacctcatcctgggtgcgctgttcttcgactacaccaccgtcagcacccgcggccagccgaatctggacggtcgcgagctggacctgtacgccgagtgggcggtgaacgagcacctgatcatcacgccgctgctgggcctctacaaacccgacaaggatgccgaaaccggcggcaaccaggtcggtggcaacggcaccaatgtctacagtcagttggtggtcgccgtaccgttctgaaccgtctcgggcgcgcagggacgcagcgcctggacctcggcataagcgccctggtgatacaacagcggcgcacgcccgaaatcgtcgaaggccaccaccttgccgatcatgatccagtggtcgccaccgtccacctgctggtatttctcacagtggaagcgtgccgagcaatcggcgaacaccggtgaaccgccctcccccggttcgtactcgatcagcgcgaagcggtcttcgcgtgggcgcgcaaagttgttggacaggtgcacctgatccgccgccagcacatttaccgcaaagtggctggcctcctcgaacacttcgtggctgttggagcgtttgtcgatactccacagcaccagcggtgggtcgagggacaccgagttgaaactgttggcggtcacgcccaccttgcgcccggacgcggtagcggcggtgaccacggtcacgccagtggcgaagttgcccagggcacgacgaaaggcccgtgggtcgaaaaggctgttgtcaggcatgcaagactcccgggcgccctcgaacggacgccctgattgttgtagtggaagaacgggtcacaccatgctcgggtccggctccaggcccatcagctcacggccgaggatctgcgcgcagacgtcgtagtcggtgtaggcatgggcgccggtcatatgcgaatcgcggaacaggcgctgcatttcgttgtgttcgaaccaggcattgccaccggctgcggcgaacaggcggtccaccgcctcgatgcacatcttggtggcgtaggcctggttggtgcgccagaacgccagggtttcgcggctcgggtaacgctgggcggcgctgtgttcggcgtggtcctgccaggttttttcgaggaatgcgcgggcagcggccacctggtgggtggactcggccaggcgcatcaacgccggcgttgccgcgcccacggcagcaccagtgtaggcgcgcacgcgggttctggttttttcgcggaacacctccagcatgcgctcggccacgcccaggctgacggtggaaaaaccactggcgaaatacggccggtatggcgcgtagaaaatctggctgtcggggtagaggccaaaacctgcggacttgccctgcatcatgtccctggccttctggatccggtgctcgggcacccaggcattgtcgatgaccagagtcttggtgccgctgcctttcatgccggcggcgaaccagtcatcgcggatctggtagtcactgcgcggcagcacggcaaagcagtaatcctgggtgccttcggcattctgtcgacggcagccgacaatcgcccattcgccgtgatcacagccgctgctccagcccatttcaccgctgaagtgcacaccgccttcgccctccaccacgcgcccgaacggcgcaatactgctgctggcggtggcatccgggttttcgccccagatttcctgctgcaaccgggccgaaaacagcgccagttggtggctgtgggtgcacagcaagctcatggcccaggcggtactggcacagctgccggcgagcaaggcgatgcagtcggcgaactcgggcagcgacagttccaggccaccaaaggccttgggttgaaaggcacggtgcaggccgatgcttttgagcaaggcgatgttctcatccggcacctggcgttgctgttcggcacgcgtggcattcgccgcgatcagcggcaggaggggcttgaggtcttcgaggagtgggtttggctttttcatggacggccccgcttattattggaagtccggcagccgctccaagtcgaggagcagcgctggatgcagggccagtatcgaacggcgcgggccggtggaaaatgcacgttccacaggcaagattgtacttttcacaggcgcggcagccacaggcatgacgcctggcaggcacagtcaagccagacgcgggtggcttgattaccctcggcttttcttttgtgaactgccaggaacctgccatgagtgatatcccgctgctgcctcacgtcgaagcgtttttacgtcgaccccatgggctgttcatcgacggcgtcaacgtccgcagccattccagccagacgctggcggtgaccaatccggccaccggtgaggtgatcgcccaggtcgccgatgccgacctggcggatatcgatgcagccgtcgactccgccaaccggggcttccagttgtggtcccaggctgcgccggcgacacgcggcaatgtgctgctcaagctcgccgacctgctggaacgcaaccgcgaagaactggcgcagatcgagacctgccagtccggcaagatcatccagattgcccgtgcgttcgaggtcgaccaggccgcgcatttcctgcgttactacgcaggctgggcgaccaagatcagcggccagacgctcaccccgtcgctgccctcgttcaatggcgaacgctacaccgcgttcaccctgcgcgaaccggtgggcgtggtggtgggcatcgtgccgtggaatttctcgaccatgatcgccatctggaaactcgcctcggcactggtgaccggctgcagcatcatcatcaagcccagcgaattcacgccgctgacgatcctgcgcatcgccgaactggccatcgaagccgggttgccagcgggtgtgctcaacgtgttgacgggcggcggccacgtcggcaaaggcctggtggaacaccccggcacgcacaaggtgtccttcaccggttcggtgcccaccggcatcgccgtaggccgcagtgccatgggcgccggcctcacccgcgcgaccctggaactgggcggcaagaacgccgccggcttcctgcgtgacgtggacgtggacaaggcggtggacggcatcatcgaagccggttttttgcattccgggcaaatctgcgcggcggccgaacgtttcttcgtgcaccgctcgcagatagacgcggtgctcgacaaactcagccagcgcctcagccgcctcaccatcggctcgccgctggacgaacgcaccgaattcggcccggtcacccaccatcagcatcaactcaaactgctcggctacttcagccaggcccgcgccgaaaacaaccggatcatccacggcggcaaactcatcgaccgccccggctgctacgtcgaacccacggtgatcctcgccaacagcatcaacgacaccctgctcaacgaagaaaccttcggcccgatcgcgaccttcctgccctacgacagtgaagacgagctgctcgcgctgatgaacaacggcccctacggcctcagcgccagcctgtggaccaatgacttgggcaaggccctgcgcatggtgccggcgatcaaggccggcacgttgtgggtgaacatgcacacactgctcgacccggcagtgccgtttgggggcaatcggtcttcgggggttgggcgggagtttggcagtgcattcatcgaggattacaccgagctcaagtcggtaatgattcggtactgagggtcagccctttcaaggtctttgaaaaaccggccatatctggctgataccctcccaatagggcggacactgcaactgtggcgagcgggcttgccccgcgttgggnnnnnnnnnnnnnnnnnnnnnnnnnnnnnnnnnnnnnnnnnnnnnnnnnnnnnnnnnnnnnnnnnnnnnnnnnnnnnncccaacgcggggcaagcccgctcgccacagaaagcccactcaccacaagaggcccgcctgccgatccccctaattggatttacgcctgcgcaatcaccgcctccgcctcgatctcaatcaaccaatccggcaacgacaacccgctgacgataatccacgaagacggcggcgggttgtgcgggaagcgctcgcgcagcgcttgcgcgatcggctcctgctggtcacgggcggactcgacgatgtacagccgcaacatgatcacgtgagacaggtcaccgccggcctcggccagcaccttttcgatgttgtccaaagcggcggcggtctgttgcgcaatacccgggccgacggtgcgctcgtcagcatccacaccgacctggccggacagcatgatgcgccggccttgcggcacttccatggcctggctgaagccgtattgcagggcgttgaataccgttgtgggattaatgaccttccgttgcatgacacttccttgttgtttgtaggaaaacaaggctaacccaaagcaatcgttcaatccggcggttcaacatcccgcaacatatcggggatcgtcgaggggtgggacagactaccaactccccatcgccagactgaacggcgaaaactccgcgaactgccaccgcaacgccaacgccgccgggcgccgtacgacatgttccacggtgaccgtccacaagcgctgggcgccctcgaacagcgccacttcagggccatcgaggatcagtgaagtacgcccagccacctgcagcacatcccccgattcaaaatcgataaacaacaaccccgccaccgggttcacctgcaaattacccaaggtgttgaagaacaggttgccggcaaagtcagggatggtcagcacgttgccttcgacccgtacaaaacccgtattgccgccgcgatgggaaacgtccaccgagcgctggccatccacctcgacatagctggcgacgaagaaggtatcggcgttgcggattgccgcttgggccgcctcatccaggctgctggaacgttcggccacgctaccgggtttacgtgcgacggcatccatcggccgcagttgaatgtacttggggcaattgccgaacgtgtgcgccacgtcgaccgaaaagccctcgtgatcgagcacaccgatacgcccattcatacggttgcgacggcgggtgttgaggtcgatgcccagcaagccaatggatgcgccttcacgcaaggcattgcgggcagggtcgctcgcggatggcaagctatcaacctgcaaggtctgtgggtccggcgagtgggcaaagcccggcgcaccttcaagcatcgtcgcccagggaataccttgctcgtccaccacacccagcatcaggtacggcaacaaggggtagaaatcccgatgctgctcgggcaaatggtcacggatcaccttgggcccgaccacggccattcgctcggcgacgcccacagcttcttgcatgtgccgttcaccggcatgccagggggattgttcgatcaggttcatggcaagcacctcatgttggataacccgatgctgcgccctgcccgccaccgagggaatcaccacgccaggcaatccactgttacgccagctgaaatgccgggtgttcacgcagcgccgccacgcagtggtcgacaaagctgcgcacgcgcatcggtgcgttgcggccttggcgatacaccacgtgcacgggcaatggcggctgttcaaaacccggcaacaggcggcgcaattgtccattctgcagatgctcgtgaaccgggtaactcaggcagcgaatcacccccgcgccatgcaccgcggcattgatcgcgccctgcaccgtggcgcagccaaggcgcgcacgggccttgagttgataaccctggaaatcccaatgcacctgatcggcactggcaatcagccgatgctgcttgaggtcgtgcgggcgttggggctcgccatgaacagcgagatagtcggggctggcgcaaagaatattccgcacctgccccacgggccgggcgatcaatgatgagtcgggcagttcaccgacgaggatcgccacgtccagcccttcttcgtgcaggtttggataatagtcgtggtaatgcgccgcgaggctcacctcgggataacggtccaggtagtcggccaacaccggcgccatcacataacggctgaacaaaaagggcagaaacacccgcaggttgccctgggcctgcacatgcaagcctttggccgaggcttcggcggcgtccacggcggcgagcaggcgcacgcaatcggccaggtacgcgttgccggcgtctgtcaggttcacgccgcgcgtgctgcgctcaagcaaccgcacgcgtagccgcgcttccaggcgggcaaccgcacggaccagggttggtccggacacctgcacactgcgcgccgcgccggccaggctcgagtgcccggccagtgcggcgaacagttgcatgtcgcgatagcgctccatcaaccgcgccgtttcatcgccgggttcagggcggcgtcctggcccaggcgatggctgaggaagtcgacaaaggtgttgaccttggccggcacgcggccgcttttctggaacaccacctggatcggtaacggctcagcctcatacgcttgaaggacgatctccaactcgcccgccgccaccgccgtggcgacctgataggacagcacccgcgtcatgccccagcccaggcgtgccaggttgatcgcggcattgtttgccgtaacgaccaggcgcggctcgatgggcacggtcaagggttggccggcgtcgacaaactcccagccactcaccagttggctcgacgatgacgtgacgatcttggcctcacgcaactgcgacggatgctccggtcgcccgtgctggtcgagataggctggcgctgcacagacgacccggcgcacttcaccgaccttgatcgcctgctggcccggctcgtgcagatgaccgatacgcacggctacatcgacgccttcgtcgaccaggttgaccacgcggtcgaccagcaacgcattgatgttcaccaacggaaagcggtccaggtattcccccagcaccggcgccacatacaactcgccgaacagcaccggcgcggtgaccgtcaggtggccgcaggggatggagtaactgcccgccgccgcttcttcggcttcatcgagttccgccaggatgcgccggcaatcttccaggtaacgctggccggcttcggtcaggtgcaagctacgggtggtgcgcgccagcagttgggtaccgatgcgttcctccatggcggcaatggcccgcgtgacgctgggcggcgaggtgttcaggcggcgcgcggcggcggcaaagccctcctcctcggccaccgccaggaacacctgcatttcatgaaatcggtccatcggcactcctctcaagcaactgcatattgctattcccctgtggcgagcgagcttgcctcgcgttgggctgcgaagcagccccaataaggccgctgcgttgtttcagaaaatacgcggtggcaggtttcagggccgcttcgcgccccaacgcgaggcaagctcgctcgccacaacaagggttcacgttaatgggattgcaagcccacggctgtgcgtggcatgccgacgaaccccggcaacgcttcaatgctggcaagccaggcgcgcacctgagggtagtcggccagcgacacattgccttcgggcgcatgggccacgtaggtgtagaacgcaatatcggcaatagaaggctgctcgccggccaggaaacggctctggctcagttgtgcctccaccagcttcaacagggcatgggaacgagcaatggcggcgacggtatcgacctcggcaccaaacacggtggcgagccgcgcggacgcaggcccggcgctcagttgaccggcggcagccgagagccagcgctgtacccgcgcctgtcccacaggatcgcccggcagccattggcccttgccgtaggtgttggccaggtaaaccagaatcgcattggagtcggccagcaccacaccgttgtcatcgatcgccggcacctggccgaagctgttgatcgtggccagatagtcggcggtcttgtgggcaccttgcttgaggtccaccaggttgtattccaccggcaagcccagcagggacagcatcagttccacgcggtgggagtggccggacaacggaaaaccatagagtttgatcatgaaaggctccaaaagaagggggtctcgacgccccgcatactccaccgctgccccggccgttggaatcaccaggatttacaatcgagcatttcatccgatgaaacaataccgctcagcgctcctcgagcctgtccctcaggaaccgatgactcaccgaaaacaaccgccgataggtcagcagcaccgcccccaccgtgcccaacgccgacgacgcggcaatcaggaacatgatcccgatctggtaccgcaccgcgtccaccgggctctcccccgccagcacctgcccggtcatcatgccgggcaggctgacgatgccgaccaccgtcatctggttcagcgtcgggatcatccccgcacgcaccgcctggcggatggcttcctgcgcggcctcccagcgtgaaccgccgagggccaggatcatttcgatggtgttgcgccccgaggtcagttcctgggtcatgcgttcgatgcccagggagacgccggtcaaggtgttgccgaggatcatgccgaggatcgggatcgcgtactgcggctcgtaccaggggtggatgcggatcaccgcaaacaagcccacggcggtgaccagccacgaactgccccacaccgacaggatgctgtcgacccgctggccccggtaagtctgccgcccacgcccggcagcggagaggcccgcgatcagggtcatggcgcacatcagcggcagcaccacgtaccagtaggcgaactcgaacacccagcccagcaggtaaccgatggccagcagttgcaccacggtgcgcaccgccgcccacagcaattggcggcccaggcccaggcgcaacagcagcgacagcgcgccattgatcaggatcagcgaggcggcaatgcccatgtccagcgcggtgaggttctggtaattcatggctgggacgctccgctcaacacaccggcactcatctgcaaatggaggtcactcatgcgccgggcctggtccaggtcatgggagacccagatgcaggcacgggtgcgatcactggcaaaccaggcgtcgatcagcgcttccacttcgcgggatgaggtgggatcgagggcggcggtgggttcatcgagcaacagcacttcggggttcagttgcagggtgcggatcagcgaaaccacctgggactcgccgcccgacaggtcggcggcgcgtttggccagaaagtccggcgtcttgccggcgtggcccagcagtgtggtcactgtcgccagatcgaagctgcgcttgcgcgaggtgttgaggctgaaggggaagcgcaggttgtcctccacggtgccgtcgagcagcgccgggcgttgggacaggtagctgatatggcagcggtagtggggaatctgcgcgttgccgatcggctggccgttccacaggacctgcccggaggtgggcgcatccagcagcgccagtgcgcgcaggaacacacttttgccggagccggatgagccggtgatcgacacgcggtcgccggcctgcaggctgaaatcggtgggctggagcaacggcacctggcggcgctcgtccaggcgcgtgagggcgcgggtttcgattaacggggtgtcggtcatgaactcattactcggttgaacggcttgcaatcaaaaacctcactgcctatattccctgcctggcgctctctacgccaccttccgcggaaagggctgcgcccaggacactgcaacatcctcttttttctacgactccccaccttgaagcggaaaaggtttgtgcaaggagatcgtatgtcccaacccttcaacaccgatggccgtctcaaccttgagcaacagcgcaagcgcgccaaggaactgctgccgcgcctcaaagcccaagacccgaacgctaccttgtcccaggcccaatgggaaatcgccaagcagctgggcttcagcagttggccaaagctcaaggcccatgtcgatgccatcgacttcgccacccgccaccccgattttgccgccagcgatgaagcccgcaccacccactggcgctgcggcaatgacattgcccacagcctgcaactggcggggttcaaaggtcagttccggatgctcaccgacccgctgtgcatggggccggtccgcaatctgccccgccaagccttccgcgccctgcgcagcgcttttatcagccaggcctttgccattgatgcagccgatgcagctcgtcgcgtcgacgccgaatacgaccacctcgaagcattggccagcgccgaccacagtgtgctgtggtgcgaagcggatgcctatgaccaactgttcctgatccgcgcactcgccggccttgaacaggtgccgcgcaaactggagctcatcgaggtggaccgcattcctggcgtgcagcgctttatcggcatcggccaactggcgccggatgtattggcgtggctgtggccgcagcggcgcttgatcggggatgatgcggtgcaattggccaaacaggcctggtcggcgtattgcgacagctcacccgtccaatgggcgcaactggcccacgacaaccaccccgccttgccgttgcttgccccggcgttgttgcgccaattacaggaactgcccggtctgcatgacggcctttcgttgaccgagcgcctggccctgacgtacctggccgagaacgggccaacgccgtttggtcgggtgtttgccgaactgatggccaagcgtgaaccgctgccgtttctgggcgacatgatgtttcatgcgctgttgcaaccgctgctcgatggcgacaagcctttactcacggccaccgagacgcacctggaatggccgcgccaggtgctggcgttgactgcgctggggcaagccgtgctgaacggtcacgccaactggctggatcacgccagccatgtgcgatgggtgggtggggtatgcctgcgacctcgccaaccccactgggcgattgatgagcacatcatgccggtctggcgcccgtgattacgctaacgtgctgcccattcaaccttcacttgcgagactgcccatgcgcaacctgatcttcgccagcctgcttctgctggcgggctgccaacaaacgccgccggccaatgaccaactcgatgccgtgctctggacccagacctctatcgagcatgagttgatttaccgacagcttttcgccaatgccacccgccaacttgacgtggcgttggccgatcccacctgggatgccctgccctttgcgccacgcaacctgaacgggttgccgccggcggtggtggtcgatatcgacgaaaccttgctggacaacgtgccgctcaacgcccgcgacgtggtcaacaaccaagtctattcctacgaccgctggaacacctgggtcgaccaggccaaggcccaggccttacccggtgccgtggcgttcctgcaagcggcccggcaaaaaggcatcaaggtctattacctgaccaaccgcgaacacagccaggtcgccgccacggtgaagaacctgcgcctgcgcggtttcccaatcgaaagcgacgaacaggtcctggccgccagcccccccaccggtcactgcgaaagcgccggctacggcaagaactgccgccgccaatgggtcgccgcccatgcccgcgtgttattgatggccggggattccctgggggatttcgtgcaggccgaccacaacaccctcgcggatcagcgcaaggcggtggagccctatatgcactggttgggccagcgctggttcttgttgcccaacccgacctatggcaactggtacagcgcgccgtatggggatgatgagaagttgccgttcgagcaaaagcgcaagctcaagcaacaggcgttgcagttgcaggagtaatccgccttggctggcccaccgtgcttgacgccatcggcccacatctgattgacacaacaaggtcatatggaaatgaaacgagtacttatcgcatcgctcggcgctctatcgctgctccaaccgtcattctcttcagcggatatcaccaacgggaaaaccctcttcacccagcggtgtgcgatgtgccatggcgccgatatcagaggtacaggccccctggccaacaagagcaatcccccgacacctgacctgaccaccgccacgttcaaaaaacgcctgaatgactacccaggcgttatcgtctcttcaatcatccttcgccccaatggcgacctgatcccgaggacgttgcgagagaacggcgtgaagctagcgccattcgcgtggagggttagcgacttccgcgatttgaatcaatacatgagcggtgtgattgccaagacgcgttgagtctcacagcgttcttgcagcgatcgcctccacttcaaccaacgcaccgggcaatggcaacgccaccacttgcaacgccgtacgcgccggtttattcggctgttccggtgtgccaaagaactgcgtataccccgcctgcaaaccggcgaagtccagcccgtcaccggcgaagtacacccggccgtggccgatgttggtcaccgaggtgccgctggtgtcggccttgaggaccacgttgatcaccccggcgatggcatccgagccgtattgggcggcgacaccgggctgctggtgagggtacgccgctcggggtaggctgttgagctcaaacataacggaatgggttttgaaaacatgatgctatttcggcataatataatattctttgatttaattatttattgattttgttattcatttaagtaatgtttttttgtgatctggggattgggggtatatccgttatttgggtaacggcggatattggttccgcccttacggcggctcacttttgaagagccggaatgccggcccagtcaaaagtaagcaaaacgctcttgccccaacactcggcacctcgcttaggctcggtgtgcccgtaatccgacagggatttgggggggcgcctaagatcaaaatcaaaagcagatcaaaagccagagccagagcaaaccacccttcaactgatacatgaagatcaaactgtgggagggggcttgcccccgatggcggtgtgtcagccaactcatcagtgactgacccactgcaatcgggggcaagccccctcccacactttgacccagtaccggccatacaatccggtcggctctaaggccgccgcgctcttgatcttgatctggggcgccccgtcaaacacgctggccgaacgcaggcttgaatccgtgggtaacccggcaggacgccgggttagccgccccgcgccatggatggcgcgtggcggcggcccacggattcaagccggagtgagggcacaccgagcctaagcgaggtgccgagtgttggggcgaaggccttttgcttacttttggctgggccggcttccggcctttccaaaagtgagccgctgtaagagcggaaccataagtagccgttaccgaagaaacggatatgtacacttacctacctacctacccggccgcaacaaccgcatctgctgccgataatcatccgtcacctgccgcgcctgcccactactggtaatcaccctgggcgtaatcaacacaatcaactccgtccgatccttggacttgctggtactcccaaacaaccagcgcaaccccgggatctttcccagatacggtacggcactgacactctccccgttgtcctgcttgatcaacccccccagcaacaccgtctgcccactctgcaccgccacctgcgtcgacaccgaacgcgtcgaaatacgcggattcaccggcgtatcgctggtaccactctggctctcggcatcactgacctgctgctggatatccatgtacaccaacccccccggattgatccgcggcaccacatccaggatcaccccggtctgcacatactcgacactgctcaaggtggtgtccgcatccccggtgttgacggtggtctggctgatgggaatgttgtcgcccacctgaatctgtgccggctggttgttcatcaccaccagcgacggcgccgacagcacctgggtgcgcccattggtttccagcgcatgcaacgccacctgcaggttcgagctgacaaacgaatagaacaacgaatccgtcgcccccagccccgccccaccaccgcccagcgcgccctggctgccggaggcattggccaccgtggtgctgccagaattgcccgccaggcggcccaagtaccactgcacccccaggtccagctcaccggtgagcttgacctcaagaatccgtgtctcgatctgcacttgcagcggtgggttgtcgaggcgcttgatcgccgcttcgatctctttccactgcgcaggacgggtgcgcaccaacagttggttgctgctcttttgcgcggtgatacgggtgccggcctccagggcgttggtggcagcgaccggctgctcttccggctcgggttcttcaacggcaggagggttgttctgcaagccaccggtattgagtgacgacagggtcgtcgtgcgcaaccccggcgcgaccttggccggcgtgtcgtccttgatcgcgccggtgccgtagatctgccgcaggtacttggccaggtcgacggccttcatgttgcgcacgtcgtagacgtacatctgtggctcgttgccgccgccctcgtcgatggtgcggatccagtcgccgacttcgctgaggtactggggctgggaagaaatcgccaccaccgagttggtccgttcaatcggcaggaagcgcagcatgcccgccaggggcatgccgctgtcagggccgaacaggctttgcaactgaggcatcagctcggccaccgacgcgcgttgcaggccgaacacacccaccgacatgcccttgagccagtcgacgtcgaaggtgtcaatggtgtcctggtagttggccagttcatccggcgtgccggccaggctcagcacattgcgcgccgggtcgaccagcagaaacgcgttctcgcgggcgaagggcttgagcagtttctgcatctcggtggcggagatgtagcgcagcggaaacagccgcgccgacaagccgctggaaggttgcgccacgctcatctgcggcaccagcttgcccgccaccgcctggctggctggcaggatcacgtagcggtcgccctgcttgatcattgcgttgtcggtccaggacagcagggtttcgaggatcgacaaggcctgctgcttgtccaccggcctggaggtggaaaagctgacgttgcccttcacaccctgggcgatgctgtagttctcgtgcaacaggtcgcccatcacgctgttgatcaccgcttcgatgggttggtcggcgaagttgaacacgatgtcgccgccctctgccttcgcacccggcgtggccgccggcgcacgcacgaactgttggttgccccggatcaactggcgctgcgcgggagacttgaccaagggctgggcaacttccgttgggggcgcctcgctgggtgggcgttgcgcgccggtgccctgcatggcctcgtgcagaagctcatcatccggttcgagacggtcgggaaagctgccacagccgcccagggcaagggcggtggccaggcataacgtggaggtgcgcatgtcgatcaagggaggggctcgcggggcaaagtaagggggggtcgcttggacggtggcggcaagcgcttggcgtagaagctcaaggtctgggtgcgaccgtccaggctgaaacgggcggattgcggagtgaggtgttccaggcgccagccgttgggcagggtctggcccaggcgcacggtcagcagcgggccgtcgacctgcttgagcatggccatctgcaggttgccggtgatcatgatgccgctgagggtgagatgggccaggctgctgacctgcgccttgcccaccacacgatccgggctgcgatccgggctgaacagcggcgcttgccacgtggcggccaggttgtccaacggcacactgggcagcccttttacttgaggagtgggatgggcgcgcacaggcgcttcgggcagccattgcggttcatcacccaggctgctgaggatcaccgccatcagcacgcccagcaaccccgacaggccgagcaagccccactccacggggcgcaaccggctcatcatggcgtcacccgcgacggttgcaggtagccgcgcaccagcaggtgcaccaccagcttgcccgcaccaccactggccggcgcctgctggctgcggcggatgcgcagctcatccacaaacaggaacggcggttggtattcgagctcatgcagcagcgcttccaggggctcgatggcgcaatcgagtgtgaggctgaccttgacctggcgatacggctcgccgtcgtcctgctccggggtgatgggcttgcgttggctcaggctgcacccgccgccgaggttggcgtggctgttgatcaggtcggcgaggcgttgcatcagatcggcggcgaccacatccgggtcgtcccccggcagcaggctggtgctgctggccgggtcctgccgcgcctgctcaagttgctggcgcaagccatcgcgttggcgcagtacaccggcatagcgttgttgttgctcgcgcagttgttcggcctgttcacccatgtcacgcaagggtccggcaaaccagctgtcgaccaacagccagtaagccgcgccgaccaccacggccagcagcaacaaggccgcgccgcgacggtcacggggtgtgaggggtcggcgcatcggcagcctcctggcgtaggtgggcgcgcagggcaaactggtccttgccggtgcgcgcatcgggttggatcaccccttcgaactgggcgttttccagactgcggcaacccttgatgcgagtgatcagcgcactggccttggcgctctggccggcgatggaaatctcgccgtccttcacgtccagttgatccagccaggtgtcggcgggcaggcaggtggtcaggtcgttgagcaacgctgccagtggcggttgcgccagtttgcgccgggtgaggtactgcgccgcgccgcgggtattgagcagttgctggcgcagcgcatgcacctcggcgacctcggctttttgctgttggacgctggcgtgcataacgtcgataacgcgctggcggtcgttgagccacagcagcatcgccgcgatcagcaacgccccgcacagccacggcaggctgcgttgcaagcccatgccggcgggccgctgcgggcgcaatggcgcgggcagcaggtcgacgccgaggtccgccgcatccacgcgatggggatgcaggcccagggtggcgcagtcggcgaggatctggtccaggcgttcgcgcaggatcgccaccaacgtcacctcaaggtgggtggaagtacgtcgctcctgacgcgccacaaagtagagttggtcggcctcgaacggggtgtagcggtccagctcgtagccgaccacggcgctgagattgcgccccgccgccaagggcagttgcacgctttgcaccagcacagcgtcggcgccgagcatcagcacctggcgcgtgttggccgctgcgaccggcgcgctcagtggccagtggtggatctgctcgggtggctcttgccacgccagccacgcgggtacacaggcgcgcaactccacgatccatgcgtgccacccctgttgcagcaggctgccgcgccagtgtcgggcgatgggttccagtcgattcattcttgccaacgcaacacccggtagggttgtgcgctgtcctccgatgggctcaataaaacggtgacttgcaggcgcgcctgataaccgccgggccgctcggcgcggctgtcgaccaccagtacctcgccggggtccacgccttcggcgttctggcgcggcaggttcagcgccttgcgcatcagcgggctggcgaaggcgggatcggggcggtccaggtcgctccacaaggtgatctcgggcagcaagcggctgtagagggtttgcgtcatgccgggcaattggcgtacttcttccagcacccgcaacggcgccaggccctggttacgtcgtgcttcgagggccgtggccagttgtgtggcctgggccggggtagcgccacaggccagggccaggcgcgtgaagtcctgggcatcagcgttgatcaggtagagcttgccgcgctcgctgcgcaggctcacgtgcaattgggcgtcgtcaaaggccagggggatgtcgcgaccatcggcaacccagtgccgatcggccatgacctgcgcgataccggcttcggcggccaacacggtctgggtgtgctggcgcagccacagggcctggcgactttccagctgtacccagccggccaggccgccgagcaacacgctgagcaacgccagtacccacagcaccagtagcaacgcagcaccacgttggcgcttcattcttcaacactcccgctggacaggttcaagcgcaaggcaatcacctgggtgacccagggcaccggccccgccacgctggcagcgatgcgcacggccgaaggcaagcgcctgggccagggccattcactcacccagccggtgggctggcccagcggtgactcgccgcgataactgaactgcaacgcctcgatgttgttcagcagcacctggggttcacgttgagaaaaccccacctgcaacgcctgttcgacccgttgcaggctgaaccgatggatcccgccaccaagcacaccaggcaaggtcgagacaaattccagacgctgcgccgtgcccacgaaaaaaccatcgccctcgcccaccgccagcggcaacgcctcgctgatcgccgtgcgcaaaaactgttgggcggcgcgcacttcatccaggctcaccgtgtacgcctgggccttggacacggcgcgattggcccccagcaatgcgccgccgaccagcaccagcaaaacgccgagcaagctgagcaccacaaggatctccagcaaagtgaaaccctgctcgcggcgcttcacaggcgcgccttcaaggtgctgaagcgggcctggtgcgagccttcgctgaggaccaggtcaagacgcacgatccgcgcttgctgccgggtgctgatcagttgccaatggatgccgtcgagttcgccctggctgacgccgttgctcaagcgccccgccgcttcctggtcgaaaatcgtcagcgccgcgtgggtcagccggtcactgtgggccacctgggacaacgagcgcgcactctggccaaaggcaaccagcagcaccgtgctgcacaccgccatcagcgtgagggcggcgagcatttccagcagggtgaaaccggcctggcgcttcatggcagcgccttggcttgcacgctgccggtgagccagccgatatcgatgcgccaacgccgggcaccattggccacgaggagattgccgccggtggaactgccgtcggggtagaactcgacaccagggccgacctgttcggcggtgtgcagcgtcacatgcaactcggacggccaccgttgcaccgctcgccccggcgcctggaacgtacggtcgctcagatcgaacacggtacgcgcaggctgcccactgacaatcgcccctgcccgcgtggtgcgcagcgcctccaccatctgccccaccgcatggcgttcctttgccacctgcaagccctggcgcacacccagccccagcacgctggcagccaggctgatcagcaggatcaccaccagcatttccagcagggtgaagccgcgctggagcatggcggccctactcccaattgcccaggtcggcactgtagccttcgccgcccggctggccgtcctggccatagaagatcaggtcgaacgcgccgtgttcgccaggaaagcgataaccgaaggcgtgcccgaacgggtccttgaggtccgacggcttggcatagccaccgggcctgtccaccagctgttgcaggctggtgggcggtgcgccgacgtcgagggcgtagctgtcgatcttcatgctcaggctggccaattgggccttgccggcgccgtacttgcccttgtccacattaccgccgacctggcgcacgacgatggtggcgacgatgcccagcagcacgatcaccgcgagcatttccaacagggtgaaaccgccttggcggcgtggttttttcatggggtcagctcctttatatattgctggtcaggctcgtcagcggcagcatgatcgccagcatgatcaccgccaccagcaccgccatgaccagggtcagggacggcaccagcgcggccagcaggcggtcgatgccgcgcttggcttcgacgtcgaagatgtcggcgaccttgagcaacatgccgtcgagttcgccggcctgttcgccgacttcaatcatttgcacggccagctcgggcagcagcggctggctgccaaacgcactggcgagggtgccgccggcttttaccgattccgccgcacgcccgacctgggcctgcaacgcatggttggtacagacttgccgcgcaatcaccaaggcctgcagcaacgccacgccattgctcagcagcgtgccgagggtacgggccaggcgtgccgcttcgacgcgttgcagcaacgggccgaccacacgaataccgagcagacgccggtcgtagcgctcgcgaaacagcggatcgcgcaggcgtgcggcccccaaccaaacgatcacgctcaacccggccaacagcgccaggccataggcgtcgagaaacgtcccgagggccaggatcacctcggtgatcagcggaatcggcacgcccaggtcctggaagatcggcacgaactgcggcaccacatacgccagcagcaacgccagggaacccagcacgcccaccaccaggaacgccgggtagatcagcgcattgatcacttcgccacgcagcaattggctgcgttccaggtaatcactgagttggcgcaacgtcccttccagcgcgccaccggcctcaccggcccgcaccatgctcaggtacaacgacgagaacgccggaccctcttcttccagcgcggcggacaacggcttgccggccttgacccggtcgcgcaggcgttcgatcaacgcgcgcacctggggtgggccgggctgcttgagcagcaggctcaacgagcgctcaagcggctgaccggcccccagcagcgtcgccaattgctgggtaaacctcaccaacgcctggcccttcaacggcccgcgtgccctgcgcaggccggggccgccggccggttcgatgtgcaacagcagccaaccgcgcttgtgcagggtcgccaccgcagcggtttgatcggtggcctccagcgtaccgttctgcggcgcgccctggctgtccagggcacggtagctgaacaggctcacgcgtcctctccacgggtcacgcgcagcacttcttccagcgaagtaatccccgccagtgcctggcgcaagccttcttcatacaaagtgcgcaaaccggcgcggcgtgcggcctgttccagggtcgaggcgtcggcgtggcgcatcagcaggctgcgcagttcgtcgttcatcaccagcagttcggtgagggcgctgcggccgtgatagtccccgcgatagagcaggatcgggcgttgttcggtgaggcggtccaggccgtgttcggcgatcagttcgggcggcgcttcgaaagcgacacgcgtggccgggtccaggcgccgcaccaggcgctgggcgaggatgccgctgacggtcgaggcaatcaggtagctttccacgcccatgtccagcagccgcgtgatgctggcggcggcgctgttggtgtgcagggtggaaagcactaggtgcccggtgagggacgattggatggcgatgcggcaggtttccaggtcacggatctcgccgatcatgatcacgtccgggtcctggcgcacgatggagcgcagcgccccggcgaagtccaggccgatggcgggcttgacctggatctggttgatgccttcgagctgatactccaccgggtcttccacggtgatgatcttgcgctcggcggtattgagccgcgacagcgcggtgtagagcgtggtggtcttgccggatccggtaggcccggtgaccagcaggatgccgtggggccgcgccagcaggtcgacaaaggcggccaagcgctggccgtcgaagcccaggctgggaaagtcgaactgcacggtttgccggtcgagcaggcgcagcaccaccgactcgccaaaactggtgggcaccgtggacacccgcaggtccagttccttgccctggatacgcaacatgatgcgcccatcctgcggcaaccggcgctcggcgatgtccagccgcgccatgatcttcacccgcgaaatcaccgccgccgacgaactggccggcggcgcttcggcgtcgtgtaacacaccgtcgatgcggtagcgcaccttgagctggtgttcgaaaggttcgatgtgaatatccgaagcacgttgctccaccgcgcgttgcaggatcaggttgaccaggcggatcaccggcgcttccgaggccaggtccttgaggtgttcgatatcgtccagggcaccaccttgttcatcgaggttttcgatcaacgtgcccatggccgaacggccctggccgtagtaacgctcgatcagcgtgtcgacctcagtgcgcgggccgatcgccagccacaccggcacctggcacgcataggccagagcctggaacggataacgcagcgccgggttggcggccagcacgcgcaggccaccctgggtccagcccatgggcgcgacctgatagtgacgcataaagcgttcagtcagggcgggcaaaggatcgagcaacggcggcgcggcgtcggccagcaacagcggcgcaccgagcaacgccgcccaggcacgggccaattcgatatcggaaaccaggcccaggcgggccagcaggcttagcaggtcatccgacggcaagcgccgggcgcgctccaggtccaccgttttcaacccggcatgctgcatcagccacgcacacacctggtcggtgtgcgggatctgcatctggcaggcatcaataggcgctgacgacataaggttgaggtatctagtattgcgaaaaagtatggctatttgaaactacttaaacatgccattagttagccataacccaagcgagaacaagccggggttatcgactggaagttatagcgctagttcctgaagagggggaataaaatagacacaatgaccgagaaccccgtgacagagccttagcagctaatagccactacttcgctagtttcaattagccacttatgcgctttcacgcaattaaatggcagcccaataaactcactggacttacttcaccttcgacgcggagcacactcgcactttcgagtggccgttaaccaggattatcgagcattgaaatgtgggagtgcgttggcatgcctgcgtgagtggtttgggggctgcttcgcagcccaacgcggggcaagcccgctcgccacagcaggcccgctcgccacaggaggccgggccggctacacagaacaaaaaccgtatccacgatgcgaagcgagtcggtcttgatcttgatcaggccttggcccgagtgcttttttcaaccaggcacatcggcgtgccagcgaccggctcttgcatcacctgcacctgcacctcaaatacccgccgcatcaactcggcactgaccacctgcgccggtgcgccatcagcgaccagtttgccgccgtgcatcaccgccaagtgatcggcataccggcaagcctggttgatgtcatgcagcacagtgatcaccgtcttgccctcggcagccagttcgcccatcaggtcgagcaattcgacctgatggctgatatcgagataagtggtaggttcgtcgagcaacaccaccggcgcattctgcgccaacaccatcgccagccaggcacgctggcgctggccgccggacaagtccgccagggcgcgatcagccaacacgtccagttccaggcgctgcatggcttggcttacgtgagcctgatcactgccgctcaagcgcccccacagcgagttatgcgggctgcgaccataggcaaccaactggcgcacgctgacgccttcgggcactggcaacacttgcggcaagaacgcgatctgccgtgccaactcccgggcagacaggctggcataggcctggccatccagggtcaactcgccctgggtcggattgaggatgcgcgcgaaggccttgagcaaggtggacttgccgcagccattggggccgatcaacgcggtgaccttgccggcaggcggtgcgaaggacagaccctgcacgatgcgcgtggcgccatagccgatgtccagctcgcgtgcctggagaatactcatgtcatcaacccttgaaccgtgccagcaaccaaagaaaatacggcgcgccgatcaccgccgtaagcaccccggcggggatttcgctgggcgcaatcagcgtgcgccccagcgtatcggcgagaaccagcagcaacgcgccgatcagcatcgcggccggcagcaggtactggtgatgcccgcccaccagccgccgcgccatgtgcggcgcgaccagcccgataaagccaatcggaccgatcacccccacgcccagactggtgagcaacaccgcgcaggccatcgccgaccaacgcgtacggctcagcgcggtgcccaggctgtgggccgcctcatcgcccaaggcgatcaggttgagcggtttggctaggcacaggcccacggggatcagcaccaggaacggcaacaccagcgccacatgatgccagttgcggctccacaggctgccggtcagcgcaagcaacgcggtgttgatatccaacggatgagaaaggatcagaaactcggtgacgctggacaaagtcaccgcaatcgccactccggacaacgcaaagcgcaccccggaaaaactcacgccggtgttgtacagcgccagcagcaacgcgccgccggccccgcccaggcaagccaccagcggcagccaggcaatcggcaactgcggccagccgatgatcgccacggtcagcgccaacccggcgccttgggtcacgccgaggatctccggcgaggccagcgggttgcggatcacgccctgcacaatcgccccggccaggccgaaggccgcacccgcgaggatcgcgatcaggctgcgcggcaggcggtggttccacacttcgaagtcgagggcgtcgtgggccagcaggcgttccagaacggtgtgcggcgtgagccacagcgtgccggcgctgaggctgaccccggttgccagcagcaacaggccaagcagcagccacaggcgcagtcgtgggcggatcatagggcgcgcctggcaagaaagaggaaaaatggtgcgccgatcaacgcggtgaccacccccgccggcgtttccaccgggaaggccacggcgcggctgagcaggtcggcccccagcacgattaccgcgcccaatgcggcgctcagcgggatcagccagcggtagtcattgcccaggaactgacgcaggatattcggcgcgatcagcccgacaaacccgatcggccccaccgcacacacgctggcgcccaccagcagcaaactggcgacaaacacttgcagacgcaggctggcgatgcccacgcccaacgagcgcgcggcgtcttcgccaaggttgatcaggttcagtcgcggcgcacaccagagtgcccacaggccgccgatcaaggtgcacggccagagcaactgcacctgcgcagcgccgacattggccagggagccggccagccagttgagtacactttgcgcctgggcctcgacgaggatcaccgtgagccgggtcaaggccgcgcacaacgccgccacggccacgccggccaataccaggcggccctgggccgtggtcggcgaccaggcaccgccgaggctgaacaccgtgatccaggccagcgcgccgcccaggcaggtcatcaacagcgcaccaccggcaaagggcagtgcgaccaggccggtggaaaacagcgccagtcccaatgcggcgcccgccgtcacaccaaacagggacggcgacgccagacgattgcgcgtaatgccctgcatcagcgcgccggcgaggcccaggcaggcgccgaccaacgcggcacacacggcccgtggcacgcgcaactgggcgacgatataggccatgttgccgccaacgctgccctggtgcaccaggccattccaggcatccgtcgccgtcagggtgaagggtgaccagctgtacagcgacagccagaacaacacggcacccaacagcagaatgccaatggcggcgaaactgcgttgcacggttattggctcaatacggctttgccgcctttaagaatcgccaacgcgtcctcggcgatctgctccgacgccagcacgccacggttgcgtgcccagctgtcgccatccacttcggccacgtgctgattgcgcacggcgccgagcacttgccacaacggctgcttgctccagctgtcgacgatgctggggcgacggtaatgaccgaccagcaaccaacccgggtcgagggccagcaattgttccaggctgacgaactcggtgggtgcggcattggcgcgtaccgctgggactttcaggccgatggcctcaagcacgctgccggcgtaggagtccgggccatgcacggagaagctgtcctcacgcgccacaccgaacaacacgctggcgccggccgggatctgttgtgcaatggccttaaggttttcacggttcttctggatacgcgcctccatctgcgcactcttgccgagggccttgccgatcagctcggcggatttgaggctgccctggtaatcctcgccacgggacggcaacagcaaggtcggcgcgatgctcgccaggtcgctgtacagcgcctggtggcgattgagatcagcgacgatcaggtcgggcttgagccgggcgatttcctcgatgctcggctgcgaacgcaggcccaccgacttccactggccgatggcctggcgtacgcggggcaacacgcggttggcatcgccatcatcggcggcgccgaccggggtgacgtcaacggcggccaggctgtcgagaaaggaaaactccagcaccaccacgcgcttgggggcatcgggcagatgcacggcgtgctggccatcgttgaggtcgatgggggcggcgctcagcaggctggacgagaacgccaagacacaggcggccagggtggggatggaacgcagcattcgcatgacaaggacctcggcgttaacacaccccagctagacaggccggggaaaacggcgggtactattccatatcggggcggcgtgatcaaaaaacattctcatttatgacctgctcggccatgtggatgctggcttgctggagggggctggcttgtgtggtcactggtttgtgtggtgagcgggcttctgtggtgagcgggcttgccccgcgttgggtggcgaagccgccccaaaacctggcaccgcgttctacctggcacgatgtggtgttcttgttggggctgctgcgcagcccaacgcgggacaagcccgctcaccacaggaagcgcgctcaccacagcaagctcgatgtcagaagtcgacggtggccgacagcaggtaggtgcgcggcgtcgacagggtcagccccggctcgctgtcatccgatgcaccggccgagctccagtagcgtttatcggcgacgttctccacgttcgcccgcagggtgatgtgcttgtcatccaccttgaagccatagcgtgcgccgacgtcgaggcggttccaggcgtcgatttccttgacgttggactggtccaggtactgtgagctggagtagatgccacggctggtcaacgtcaggccttccaggcccggcacgtcccattcggcgccgaggttgacgttgtacttgggcgtcgccggcgcgcggttgccgtcccaggtgccattggtggtgtctttgagtgtgctgtcgatgtacatcaccccacccagcaggcggaagcccttgagtggctcgccgaacacgctcaactccacgccggagttctcacgcttgccattgggcccgaacagccgcgtggtcgcattggtttcataggccggctgcttgatgcgaaacacggcggcggtcaccgcgaaggcaccggcatcgtacttggcgcccacttccacctggcggctgatgaacggcgggaagatctcgtcttcgttcctcgacgtcgacggcgcgatcttgccctggctcaggccttccatgtagttggcgtacaacgacagcttgtcggtggccttgaacaggaggccgcccgacggcgaaagcttttcttcgtcataggcagtgtcgcctttgattccgtcgctccagtcagtcaccttgacccgctgccagcgcgcaccgagggtgagcaacaggcggtcgtcgaaaaagcccagggtgtcggacaaggccacgccactgaatttgttttcggtatagaccttgggatcgaagcgcgtcggccgtgacggcgtcgacgactgcaccgggttgtagagattgctcgacggcgccgtataccgcgcaccgccgttggtgaagtccatgtcgaagtagctggcggccaggttgacctcatggctcaccggcccggtgtggaaccagttgcgcacgccggcggtataggtgcgcacgttttcatcacgggtgaagtcccgcggctgcacgctgaaatcaccggccgcattggtcaccgaaaccgcgtggcgtaggaagtcgtggttgcttttgcgcgcgcccacgccaccgtagagcatcacgttgtcactgaggtcgtactcggcgttgaccgtaccaaaggtgtcattggtgcgagccttgctccacgactgcgcatagttgcggcgcacgtcgttggcactcgggaccggcgcagcggccgccacctgcacgcgctcctggggggcatcggtgtcgcgctcggtgtggccgatatcggtggaaaggcgcaggcgctcgccgcgaaaatccaggcccagcacggccatttcgcggtcgacgctctggtggtcccaggcggtgtcgccggattgcttcacgccgttgaagcgaatgccgtactggttgtcttcgccaaagcgtcggccaatgtccaccgcaccgccggcctggctgtcggaggcccagttgccggtaaacgagttgatgtccttgtcggtggcgcgcttgggcaccacgttgatcccgccgcccacgctgccccgcggcgaaatgccgttgatcaactggctcgggcctttgaggatatcgacgcggtcggccatttccatgtcgatggtgtacgtcggcagcacgccgtacaggccgttgtaggccacgtcactgttgaacaggctgaacccgcgaatggtgaattgctcgtagcgcccaccggccgggttagtggcgcgcaccgaggggtcggcggcgatcaggtcgccgagggtgcgcgcctgctggttcttcaccgcttcctgggtgtaggtggtgatgctgaacggggtctccatgaagtcccgcgtgccgagcatgccctgtgccgtgcggcgcgccacctggccaccggcgtaggtgtcgccgtcgtacaggccggtggtgccgaggatcgacgtgggtgccagctccaggctgctgccctccggcaccggcaccagcatgtaggcctgctcgcccatggcttgcagttgcaggccggagccttgcagcaggcgggcaaagccctcctccacaccgtattcgccggacaggccagtgctgctgcgcccgctgaccagcgccgggtccaccgacaggttgacccctgacaacccggcaaaacgcgtcaacgccgcgctcaggctgccggccggtacctggtaactgcggcgggtgctggtgtcttcggcgtagctgacggcggcgaaaaacgggctggcgctgaggctcagcatcaggctcagtttcagcaaggggcggactgcgggcattggcggaagctctcgatgttgttcacttgcctggaatgacaggcgagatgaaaaaaagggacagccttcagccaattttctttcttaccatactgcgatcgttgaatccgtccttggctccgttccgccgcacaatacaccactgaccggatcacgcaggatgatctggccgcgcccatagtcggtgaggtcgctggcgatctgcacctgatgcccgcgtcgcgccagggcattggccaggtcacgggaggcaccctgttcgatgccgaccttcatgtcgcccagccattgccagcgcggcgcgtccagggccgcttgcgggttgaggccgaagtccaccaggttcatcaccatctgcacatgaccctggggctgcatgtagccgcccatcacgccgaatgggccgagggcctgtccgtcctgggtgaggaagccggggatgatggtgtggaaggttttcttgcccggtgccagacagttggcgtggctcggatcgaggctgaattcctgcccacggttctgcagggcgatgccgctgtcgggcagcaccacaccggagccgaagccgtggtagttgctctggatgaacgagaccatattgccctcggcatccgccgtggccaggtacaccgtgccgctggcatgggggtcgccgggtttgggcggttgcgcctgttcgccgatctgcccacggcggcgggtgctgtaggcatcgctgagcaggtcggcgacggccacgcgcatgtgcagcgggtcggtgatgtagtgcaggccgtcgctgtaggcgagtttcattgcttccaactggcggtgccaggtctgctggctgtcgcggtgatcgaagctgaagccttcgaggattttcagcgccatcagcgccaccaggccctggccgctgggcgggatttcccagacgtccacaccccggtagttgatgtggatcgggtccacccattgggcgcgataatcctgcaggtcgctggcgcgcaggtagccgccactggccttggaatgggcatccaggcgttcggccagggcgccgcgatacaggctttcgcaacgggtcgcggcgagttcttccaaggtgcgcgcctgggccgggttgcggaatatctcaccggccagtggcgcgcggccgtcgatcaggaacgtgtcgaaccaggcgtccagggctgagtcgcgatgggggctgaattcgtccagcgcgacctgccatagctgggcgatcaccggcgacagcgggaagccgtcacgcgccaggctgatagcgggttgcagcaactcggcaaacggcaacttgccgaagcgctcggacagctcggcccaggccgatgggcagccgggcacggtgaccggcgtccagccatacagcggcatccggtcgtgccccgccgccttgaccgcctcgatactcaaggccgccggcgcgtggccgttgccattcaggccgtgcaaccgacccttgcaccagaccagcgcgaacgcatcgccgcccaggccacagccggtgggctctaccactgtgagcgcggccgccgtggcaatcgcggcgtcgatggcgttgccgccctgttgcatcatctggataccggcctgggccgccaggggctgggacgccgcaaccatgccgcgacgggcaaatacgctttggcgctgtgagggataggggtactcgtgagcagaaaatttcaacatggcaaaggctcttccacacaaggtttcgggtcataacacacggctgagaaacgctcgggtccgcgggtggctggggtggctgaagatctgttccggcggcccttgctcgatgagttcgccctggtcgagcaccaccacgcggtcggcgacttcacgggcaaagcccatttcgtgggtgaccaccaccatggtcatgccctcctcggccagctccttcatcacctgcagcacctcaccgacggtttccgggtcgagggcgctggtgggctcgtcgaacagcatggcctggggtttcatcgccagggcgcgggcaatcgccacgcgctgctgctggccgccggaaagcatcgacgggtagtggccggccttgtccgccaggccgacccgcgccagcaatccacgggcttgctccagggcttcggcgcgcggtgtgccaagcacctggatcggcgcttcgatgatgttttccagcgcggtcatgtgcgggaacaggttgaaacgctggaacaccatgccgatgtcgcggcgctgacgcgcgatgttgcgctccgaatcacgcaccaggctgccgtcgctgcgctcgcgatagcccatggcacgaccgttgacgcggatgcgcccgccctggatgtcttccagcaggttgatgcagcggataaaggtggtcttgcccgagccggaggcgccgatcagcaccaccacttcgccgcgccgcacttgcagggagatgcccttgaggatctgcagggtgccgaacgacttgtggatgtccagcgcctcgatgatcagttcttcactctggtgcgccatggttatcgtcccctcagcagtttcaaggtgctgcgcccgaacatgcggctggacgccggtggcggcgcggatggccggtcggactggccgaagcgcgcctccagccagcgctggaaaaagccccacagcgtggtaagcatcaagaagtaaatcgccacgaccaggtacaactcgaacacgcggaacgtcgccgaggtgaccatctgcgtgctgagcagcaactcctgcacgccgatcacgctgaccagggtggtgttcttgagcatcacgttgaactcattgcccagcggcggcacgatcacgcgaaacgcctggggcagcacgatgcgccgcatcagcttggcaaagcccatgcccagggaacgcccggcttcgtattggcccttgtccaccgcgccgatgccggcgcggatgatctcggccatgtatgcgccttcgttcaagcccagcgcgatgatcgccgcctgaatattgccggggatgaccaggccgaacagcgcgatatcctcgaagcggaaaatcccgcccgctgccaacgcggtgtacaggaatacgatctgcaccagcagcggcgtaccgcgcatcagccacacataaaaacgtaccggcaagtgcaacagcgggttcttcgacaagcgcagcagcgccgccgccaaccccagcacacagcccagcagcatcgccgacaccgcgatcaggcaggtcagccacagcccggtgaggtacaccccgctcggctgcaacaggtactgccagaacacatcccaattgaaattcatcgccggtgtgcctcagtcgagtgtgtcgctgctgacatgccacttgttcagcaactggacgtagctgccgtcgctgcgcatgtcgctgatcacttgctgcacggcggcgctgagttgcggatcatctttgcgcatgcccagaccggtgaggatgcggctgaacgctggcacgccttcctggaacagctccggggccatcgccgcgtaataaccggcggtttccacggtggtgccgtaggcatcaacctggctgatgcgcagggcctggaaggcgtcggtatcggtgttgtacaccaccagtttcatcggtgatttgccggccttggccaggctgtcgttctgcgcgtccagcagggtcttgatggtagagccgttgagcaccgcgaccttgtgcccggagagatcatccaggctcttgatgcccttggggttgcccttgggcaccaccaccgactggctggaatacatatagttgacgatgtcgatcacctggcgccgctcgggtttgtcgaacagttggtcgacgatcatgtcgcactgctgggcgagcagcgccggcaccaggccagagaacggaatcacccgccactgcacctgtttgtcgcccaggcgcttggcaatttcgaggcccagctcgacggtgagcccgcggggtttctgtgcttcatcgaaggacaccaggggcggtgaatccatccccgagcagtaggtgagtttgtcgacgttcttcagacgctccggcacctggggcgcggcgacggcccattgggtacagaggccgagggagacagccaccagcaaggcgcggtgtttatgcatgaccagacactccagttcgttgattaacggggcaggactcaacgtcaacacacagcaggtgtttcttattgttgttgttcgctttgcaggaactggatcagcgccggcacggtgccttcgatatgttcgcgcaccacggcttcggcgcgggcggcgtcaccggcacggatcgcgtcgagaatcaccgcgtgttcctggcgggcactgagaggtttttcgccgtgttgcaaccacaggcgcatcggcgcttcgaccagtgagtacagcgccgagatctgcttcatcaggcgcgggcggccactaaggctgcacaggtattcgtggaaggcacggtggcgactgacccaggcggcgctgtcatcacggtagtcgtccatcgcgtcgagcaagcgctccagcgcggccaactggcgctcgccgatgcgccccaccgctacgcgcaccgccaggccttcgagggcgctgcgcatttcgaacacttcgtgcagttcatcgatatccaggccgctgacgatggcaccgcgattgggccgcaagttcaccaggccctgggcgtccaggcggcgaaaggcttcgcgcaccggcatgcggctcatgccgatctcgctggcgatgtcttcggcgatcagacggtcgcctttgcggtaacgaccgccgcaaatggcatcgagcaggaagttgtaggcctcctcctcggcagtgaggggctggcggtcaacgtaagcgggggcaaattgcatcggcagcaccttttgaatttttgtatccaattatccatggatacgaaaaagcaggatgtgtgccaagtgaagtcatgatgagccaagcgcttgattcgaatgaaatagacccgttcgtcaccggaaaacatgaagcgatcgtgcagaagcccgctacctaaccgctcagaaaacgccccatcagtgggcagaagtaacaagcgagggcacgcccgggaatgcctcactcgcagacggcagctcactcatgcgtatgaccgccagtggacggccacacgcggccgctcactgtggccattgctcaagcagtatcgagacgaatttttccgccgcaggcgaaagcgatgagcctcggcggtagaccaagcccaaagaacggttaaccactggctcgatcaacgggacgctgaccaaggtgggatgatcatcagccggcatggccaggcttggcatcgccgaaacccccaggccggcctccaccaggcccaatgaagtcgaaaggtgctggacttcatagaaccattgcggccgccaactcaaacccgatagagcgtggtcgagcagcatgcggttgccgctcaaacgccctaccccgataaggcggtaatcgctcaattcagaccaggtgaccgaactgcgacctgccagctcgtgatcacgccggcacgccaatacaaagggctcactgaccaatggcacgaactcaatgtccggatgctgcccactcatcatgttgataccgaagtcggcttccccgcgcagtaccgcttcaaggccctcattcgcactcaaatccagcagacgtatgcggatttttggatagcgctcgttgtacagacggatcactgaaggcaggaaatagaacgcggcggtagggatacacgccagggttacacgaccgatctggcgttcggccagttcacggatattaagaatcgactcgtcgaagtcatccagcaaccggcgcgccttgggaagaaagtcacgcccgacgctggtaaggctgactttgcgggtggtgcgatccagcaacgccgtgcccagcccctcttccagtttttttatccgccggctgagtgcaggttgagacagatgcaaagcatcggccgcttcgtgaaagctacccaattcggcgattttcacgaaagatcggatgtcgtttagctcatagtccatgtccagtctcgtcagccaaggaaatagggaagtcgtttagcgcacttttatcattcgccaaacgcaataataacgtcaatttttgcattggaaacatttttcaaagcttgagactcttgctcccagagcatcaattacctcgattgatcaacaagagtcagtattatgcaaagaatcccctgtgtgctgatgcgcggtggtacctccaaaggtccggtttttctcgactgggatttgccgtcgtccatcgaggcccgcgacgaactgctactcaacctgatgggctccggtcatgaactggagatcgacggaatcggcggtggcagcccgcaaaccagcaaggttgcgattgtcagcccttcactgcacccggatgcggacgttgattacttgtttgtccaggtgatggtttcgcagcgcagagtcgacagcgcacctaattgcggcaacatgctgtgtgcggttggcccgttcgccatcgaacagggcctggtcaaagccacccccggacgcacccgtgtgcgcattcgcaacgtcaacaccgggaccttcatccattccgaggtgtacacaccggatggcaaagtcagttatgagggcgataccgccattgatggtgtgcccggcaccgcggcgccggtgcaactgaccttcctggatgcagccggcagcaagacgggcaaactctttcccaccggcaacacgcaggacgtcattgatggcattgcggtgacctgtatcgacatggccatgcccatggtgctcgtcgaagccagtcaactgggcaagcgtggcgatgagagcccagcggaactggacgccgataaagaattcctgcgacgccttgagacgctgcggctgaaggccggcctggccatgggcctgggcgatgtcagcggcaaagtgattcccaagccggtgctggtctcgcccgcgaaagctggcggtacgattcaggttcgctatttcatgccgcacaactgccaccgcgcgctcgccattaccggctcgattggtctggccaccgcgtgcgtgatagaaggcagcatcgtcgcgcagatgcttggcggggtcagcacgccgcgtcgtgaagcggtgcgtatcgaacacccaagcggcgggattgatgtcgtattgtcctacaccggccgcaatggtgagacaattcaagcgtccgtcgtacgcaccgcgcgcaggctgttctccggttacgtctacgccactgagtcacagcgcctcgccggataattccggcggtcgttggcatttttgcatccgcacaattctaaaaatgggtgatgccatgaaagttgttaaatcgctctacttccagatcctctgcgccgtggtgctgggcattgtggttgggcatttctgggctcagcaggccatcgcactcaaaccactgggtgatgcgttcatcaagctcatcaagatgatgattgcccccgtggtgttctgcaccatcgtcaccggcatcgccggaatgagcgacaaacgctcgctcggacgcctgctcagcaagaccatgctgctgttttttggccttacggtgatcagcctggtcattggcctggtggcggtatacgtgttccagccgggcgtcggcatgaacattgatcccacccaactgagcaccaaaggcttggcccagtacaccgagtcggcggcaaagcttggggttgtggagttcttcatgcacatcatccccgaaaccttcgtgggtgccttcagtaagggggaagtgctgccggtgctctttattgcggtgttatccgggtttgccttgtcatccctgggcgagcgtggcaagccggtactcgacgtactcgaagccgcttcgcagatggtcttcaagatcttcgcgtacctgatgcgttttgccccggtcggagccttcggcgccctggcgttcaccgtgggtcagtacggcatcacttcgctgggttcgctggcgaagttgatcatgaccttgtacatcgcctgcggcttcttcgtgttcgtgatcctgggcagcatttgccgtagcaacggcttcagcctgtggaaactgttgcgctacttccgtgaagaattcctggtggtgctgggcacgtcctccacggaaccggtcatgccacgcatgctggaaaaactcgaagcgctgggctgcaagaaaggcgtcgtgggcctggtactccccaccggctactcgttcaacctggacggtacggccatttacctgtcgttggcggcgattttcattgcccaggcctgcaacattgacttgagcctgacgcaaatcatcaccatgctggcgatcatgctgttgtcctccaaaggtgccgccggcgtgacgggcagcgggttcgtcgcgctcgcttcgaccttgacggtcattcacgacatcccgttggccggcctggcgctgctgatcggggttgaccgcttcatgtccgaggcgcgcgccctgaccagcctggccagcaacgccgtcgcgacggtagtgatttccctatcggaaaatgcctgccatcgcgaaacgctgcaccggatgctcgacgcaaaaccctctgcgacgccggtagaagcctgggaagacctgaaagtccccaagcgcgtttaacaatcaccgggcaacgcccctccctgacttgacccctcctccgccaggcgcctttggccgcccggcggatcagggcgcgtgcgcctcggcgtcagccactattacgataacaacaagagaatcgtcctatgctcgctttccttggcctggccatggtggtcgtatttaccgtcctcatcatgacgaagcgtttgtcgccaatcgtcgcgctcaccgttgtacctatcgtcttcgcggtgattggcggtttcggtggcaccaccggcaagatgatgctcgacggcctgaaaatggtcgcaccgtctgccgcactgctgttgttcgcgatcctgttctttggcctgatgatcgacgcaggcttgttcgacccgctgatccgcaagatcctcaagcgggtcaatggcgacccgatgaagatcgcggtcggcactgccctgctgtccttgctggtcgcactcgacggcgacggcaccacgacctacatgatcacctgcgcagcgatgctgccgctgtataagcgcatcggcatgaacccgatgatcctggcgaccatttccatgctgtcgctgagcatcatgagcggcatgaccccctggggcggccccgcgacacgggctattgccgcgctgggcctggatgccggcgaatacttcgtgccgttgctgccgaccatgatcggcggcgccctgtgggtgatcttcaccgccttcctgctgggacgtgccgagcgcaagcggatcggcaatgtccaactgcagagcggtggcggcgattgctacatcaacgcgattcttgaggacaccccccacaagcgtccgaaactggcctacgtcaatctggtgctggtcattgcggtgatggcggccctggtgatggggttgatgcactccgcgatcctgttcctgatcggctttgtgctcgcgctgatgatcaactacccgcaattggacattcagaaagaacgcatcctggcgcactcgggtaacgccatgaccgtggtgttgctggtattcgccgccgggatctttgccgggattttttccggcacaaagatggtggacgccctggcacagaccctcgtcgactggatcccgccatcctggggccacctgtttccattggtggtggcgatcaccagcatgccgctgacgttcgtgctgtccaatgacgcctactattttggcgtggtgccgatcctggccaatgccgccgccgcgtatggcatcgatccggttgaaattgcgcgcgcctcgatcctggggcaacccgtccacctcatgagcccgctagtggcctcgaccctgttgctggtgggcatggtcgatcgcgatatcggcgacttccagaaggccaccgtcaaatgggcagtgctgacctcgctggtcgtcaccgcgctggccttgttgaccggggccatcagcctgttcacctgatccacccacaacctctgctgtctttcagcgcgcctcgctcacggggcgcgtgtcgccctgcaccccaaataacaacaaagagtcatttgccatgaaccctatgtatgcccgtcgggctttgttttgcgcgttaggcctggtacccgtcgcaggagccaacgccgaaggttttattgatgacagcaaactcaagctgcaactgcgcaacgtgtatttcaacgagaactttcgcgacgagcacggcttgagtgcgcgagccgccagaacggcaaaaagcgagcgtaccgagtgggcccagggatttctgctggactatcagtccggatttacgccgggcaccctcggctttggcgtggacgccctggggctgtatggcgtgaagctcgattcagggcgcggccgcagtggcaccgggctcatgccggtgcacgatgacgggcgagcggcccacgagttcgccagcgccggcgaaaccgcaaaggccaggttcgccaaaaccacggtcaagtacggcaccttgctgcccaagacgccggtgctgatttacaacgatgcacgcttgttgccccagacctaccagggcacccaggtcagcagcaccgacatcgacaacctgaccgtcaccggcgggcacctggaccgtttcaaactacgcgactccaccaacagcgtgccgatcgtgcccgacggctacagcggggaaaaatcgggagatttcaactacgccggggctgagtacaaatggggcaaaaaccttcgcttgagttatttctacggggaactcgagaacttctaccgacagaactttgccggcatccagcacgacctgccactggccggtggtgtgctgaccagcgacctgcgctacttcaacagtgttgatagcggcgctggctacgcgggcaaaatcgacaatgacatgttcagcggccagttgtcctacgtgatcgcaggccataccgtcggagggggctaccagacccttcgcggagatgccggtctgccctacatcagcggcgccaccgtctactcattcagcaacgccggtatcggcaaattcatcgaggaggacgagaagacctggatgctcaactacggctacaacttcgccgccgtcggcgtacccggcctgaccttctcggcacgctacctgagcggcaatgacggcaagtccacgaccacggtcaaggaatgggagcgtgataccgagctggcctacgtggtgcaggccggcacgttcaaggggctgggggtgcgcatgcgcaactacgtctatcgctctgaattctcccggggccgcgatagcaaccgcctctacctcacctatgacattgccctctggtaagtcgacgatcgcggcccttgcggccgctttccttcaggttaaggtgaggacatcccaacatgctgttcaagaacaaatactgattctgccggtgaccctgcccgttcatggcctgctcaactggagcacttacctgttcaaggacaaggcattgtgatatcactgcttccaaggccgcggcctgaagcggcggttctggagagcggtcgatgagggtatttggcctggcaatactcatcccaacatgcgccgtcagctatctcatctgcacgggtgacacagcaatagcgctggcggccagcttcttgttctatctcagtgcggtcctgctctacatgtatccgtcggtttgcgtagccctcctccaccctgatcctccccgtgccttactcacgaaaaatctccttgcgggctggaccggcatcggctggttcaaggcctatcgttgggcccttgccgaactgcgccaacacgaagcaaatgcactcaagcgcggagatagaaagtgatggcctattggcacttcttcaaaaggcgcaggtcaatcgtgcatcactacccacgttagtacgtcatcatgcacagctggaagaaaatatcgctgaccgagggtctggagcggagcctgccggggcacaaggtcgattgcgttctgatcaatggctggactgctaccgtctttgtcaggtcgccagaaaccgaatcaatgttttgtacaacgggtatcaacctggccaagcttgcagaccgctcgagcgtgcagcagcttgcagacgagataacatttgagattgatatgtccaggaccaggagcgccggctagcgctccccctgcttgatcattcaatttcgctgcaacaaggtgttaggcgcgacgccgaacgctttgcggaacgcatggctgaaatgggagaagtcagaaaacccgaagtccagcgcggcctgcgagatactgcgcacctggccgcgctcgatcgcttcacggctggcattcaggcgttccctccaaatctcggcggcgggggttttctggtaccgcgcgaacgcgcgcgtgacggtgcgggtggacacattgtgggcttgagcgatgacctcaatcgacaggtccggctcggccagatgccgttggatgtactgcatgatgcggccgtaaaggtccagttcctggtgagtggccttcaggtcctggagttccaggctgatcaccagaaggtcgagcaacgcctctgaatagcgactggagatgccctgatcctgcaaggatgccggggtaatcgctgcttggcgcagcatttcacgcaagggaatcacgccgggccgccgatcatcgagaaccatcgcggtgtgctccgcaatacgcggcaggcgttcagtcagcaatgcccgcggaatacgcaccaggtgattttcggtaccaccgaggctgaatcggaacggttgcgttgcgtcataaagaaacaaattgccagtggccaggctggcttttcttccgctctgttcaatttgcccatgaccgttccgggcgaaccccagccataaatcgtcggccggaccgctacgcagatgttgcgcggaacgctcccagtaatgcaggggcgatgacagtgaacagatgtccagacggcctaaggtattgaccgcaagcacaccatcgaaactgctctgggacaagggtttgctatcggccgccaggcaatggcggcagaccacttctttccagtaatcaaagcgacgtggtgcagcaacagcaagggtcgaatactgagtgcttggattcatggcactgacctcggtacggcaatacagttagagctcgaaaaggtgttaccggcttttcagcgctagcaattaataggccagacacattgacggtcgccctcacgtactcatagcgacttcctgcgcccgagcgtccccaataagaggcaaacaggcctgggctttcgacacgggcgcaccaacgccgatcaccggaggggtcccccccggggttgtcttttccaaccaaacggttgtctcgacgaaccaagcggcctctcgccgtcacgcctaatttccacctcacagcagctcaacccccgctgatgaggcacgccatgcatcgacactgttcacaccctttggctgatgcctcctggctcctgcacaggcgcgacctcgtgcctgaagagtcggcttattggttgatcgagtggggggccatgaagctgctgcgccgacgacagaccgccaagcgcgacccgtcgcccaagcactgatgcccacccgtaggcctgaacgaaaataacgaggagctcaacatggaatctgcaatcgacacacatctcagatgcccacgcaccctgtcgcgccgcgtgcccgacgagtaccagccgccctttgccatgtgggttgcacgcgccgacgagcaattggaacaggtggtgatggcctacctcggcgtgcagtaccgaggggaagcgcaacgcgaagccgcgctccaggccatgcgtcacatcgtcggcagcttcagcctggccgatggcccgcagacccatgacgtgacccaccacaccgacaacagcggctttgataacttgatcgtggtcggctactggaaagacccggctgctcactgccgctggttgcgctgtgctgcggtcaacgactggtgggcctcccaggatcgcctcaatgacgggctaggctattttcgtgaaatcagcgcaccgcgcgccgagcagttcgagacactctacgccttccaggacaatctacctggtgtcggcgccgtcatggacaagaccagtggcgaaatcgaagagcacggttactggggctcgatgcgcgaccgctttgcgatctcccagaccgactggatgaagcccacgagtgagctgcaagtgatcagcggtgatcctgctaggggcggccgggtggtggtgctggggcatgacaacctcacgctgattcgttccggccaggactgggcggacgccgaggcggatgaacgctcgctgtacctcgacgaaattctaccgacgttgcaggacggcatggacttcctgcgtgacaacggccagccgttgggctgctacagcaaccggttcgtgcgcaatatcgacctggacggcaattttctcgacatcagctacaacatcggacactggcgctcggtggaaaaactcgagcgctgggccgaatcccacccgacccacctgcgtattttcgtgacgttcttccgcgtggccgccggtttgaaaaagttgcggctgtaccacgaagtgtcagtgtcagacgccaacagccagatcttcgagtacatcaactgccatgcgcacaccggaatgctgcgcgatgccgctgccgcacaaggagaacggccatgaaattgagtcgagtcgtgttggtgctggggatgttgccgtttgccaaaagccaggccctcgaggtcgcgccgggggatttcgaaccgctgcccgccggggccgatgcggtgttgttttactaccagcacgccaaccggtccgagctgtatcagaacggccatcgaacctccgacaacgccaagctcagctccgacgtaggcatcctgcgttacatccatgccataggccttggcgaaaacctttcatgggaaccgcagatcttgctgccgttcggctacatgaacgcctctggcgacgtcggcgcgctgggtgatgcacatggcctgggtgacccgattctcaccgccccgctcaagtggacactccccaccgccaacaaggatgtgtttgccctggccccctacctgtacatccccgtgggcagctacgacaaaaacgacgccttgaacctgggcgagaaccgctggcgggcaacgttacaagcggcctatatccaccacttctcagcgcagtgggcattggacaccgtcgccgacgtgtcctgggtttcgaccaatcacgactacggtaccagcagcgcgaaactcgaagaaaacacgcgctacgagtaccaggccgccgtgcgctacaactggaccccaagcaccacgttcgccctcggtggaggctatgtcaccggggccgcaaccagcatcgacggcgttgaccagcacgatggcgtgtcgacgtcctacgcacgtttcacagtcacgcactttattgatcccacattgcaggtacaggcgcagctcggcagggatatcgaggtggagcaaggcttcaaggaaggcgcgcgcctgaatctgcgcgtcttgaaagtgttctgaatgccgctgtccttttcagccaagtgcgtgtcctgctcaaccatgcgaatacggtgatagacgcctaatttggtgtacatcaccacccggactgaatcgataaaaagacaggaaaatcatggccattactcgtcccacgctggatcagctgttagccatcgcggcccagttgaacatgcgactgacccaggaacaggcagcgtcctatctggatctgatgcaaccaagtttcgatgcatacgatctggtcgacgaactgtgtgatttcgttccgccgatacgttacgagcgcagctcaggctatcgcccctcggccaaggaaaacccgctcaacgcctggtactaccggactgaagtgaatggcgcccgtggcggcctgctggccggtaaaaccgtcgcgctcaaagacaacatcgccctggccggcgtcccgatgatgaacggcgccgcaccgctggaaggttttgtaccgggtttcgatgccaccgtggtcacacgtctgctcgatgccggcgcgaccatcctcggcaaagccacttgcgaacactactgcctgtcgggcggcagccatacctctgacccagccccggtacacaacccccatcgtcacgggtatgccgccggcgggtcgtcatcgggcagcgcggccttggtcgccgccggtgaagtcaacatcgccgtgggcggcgatcaaggcggctccatccgcatcccgtcggccttctgcggcacctatggcatgaaaccgacccatggcctggtgccctacaccggcatcatggcgattgaagcgacgattgatcatgtcggtcccatcaccgccaacgtgcacgacaacgcgctgatgctgcaggccatggccggttccgatggcctcgacccacgccaggcggcgcctcaggtcgatgactattgcagttatctggcgcggggggtgagcgggctcaggatcggtgtgttgcaggaggggttcgcgctggccaatcaggatccgcgcgtggcggacaaggtgcgcgacgctgtcgcccgtctcgaggcgttgggcgcccatgtcgagacagtgtccgttcccgaacacaacctggcaggttcgttgtggcaccccatcggttgtgaaggcctgaccatgcagatgatgcatggcaacggcgcaggctttaactggaaaggcttgtatgacgtcggcctgctggacaaacaggccggctggcgcgaacaggcggaccaattatccgcgtcgctcaagctgtgcatgttcgtcggccagtacggcctgacccactacaacgggcggtattacgccaaggcacagaacctcgcccgctttgcccggcaaggctatgacaaggccttgcagagctatgacttgctggtgatgccgaccacgcccatcactgcccagccccacccgccggcgggctgcgcgatcactgaatacgtggcccgcgccctggaaatgatcggcaataccgcgccacaagacatcaccgggcatccggccatgtcgattccctgcggcctggtggacgggctgcccgtcgggttgatgctggtcgccaggcactacgccgaaggcacgatctaccaggccgcggcggcgttcgaagccgcggtggactggcgcacgctctgagcgcccaacctgaaaacaataagaaagaccggcacgtttcaaccactccacaaccgcgatgactgacaggagataccccatgagtccatctacttccacgcctgcgagcacttcaacccccggtgaacgggcctgggcattgttccaggtcctcaagagcaaggacctgattccagagggctacgtcgagcaactcacgcaattgatggagcacggctggagcccggagaacggcgcccgggtggtcgccaaggcctgggtcgatccgcagttccgggcgctgttgctcaaggacggcaccgctgcatgtgcccagttcggctataccggcccgcagggcgaatacatcgtcgcgctggaagacacgccacaggtaaaaaacgtgattgtctgcagcctgtgctcatgcaccaactggccggtgctcggcctgccacccgagtggtacaagggcttcgagtttcgtgcccgcctggtccgggaggggcgcaccgtgctacgcgaactggggacggagttgccaaccgacgtggcggtcaaggtctgggataccagcgccgaaacccgctacctggtgttgccgctaaggcctgaaggttccgaacacatgagtgaggagcagcttcaggcactcgtgaccaaagacgtgctgatcggcgtcgccctgccctgcgttggctgagaaaaaccacgcatcatcgttcaactcccggagtttctattatggatggctttcacgatctcggcggtttccaaggctttggcaaagtccctcacaccatcaatagcctggactacaaacaggtattcaagcaggactgggagcacctggcgtacagcttgatgttcgtcggggccgatcatttgaaaaagttcagcgtggacgaagtgcgtcatgccgtcgaacgcctggacgtacgccaacatgtcggcacccagtactacgaacgctatgtcatcgcaaccgccaccttgctggtcgaaacgggcgtcatcacccaggcggagctcgaccaggctttgggctctcacttcaagctggcaaatccggcacaggcgggagggcgtgcggcgatcaccggtcgcgctccgtttgaggtcggcgaccgcgtggtcgtgcgcgacgagtacgtggccgggcatatccgcatgccggcctatgtgcgcggcaagcaaggcgtggtgttgcaccgcactgcggaaaaatggccgttcccggacgcgatcggccatggcgataccagcgcggcgcatcagccgacctaccatgtggagtttgcggtgaaagacctgtggggcgatgcagcagatgacggcttcgtggtggtcgatctgttcgaaagctacctggaccacgtcgatgcccctcgagcggtgaacgtatgatggacggcacccaggcgggccgactgccggtgacggtgctttccggcttcctcggtgccggcaagaccacgctgctcaaccatatcctgcgcaatcgcgaaggcctgagggtggcggtcatcgtcaatgatatgagcgacgtcaatatcgatgccgccgaggtgcagcgcgacgtgtcgctgcaccgtggtcgcgatgagctgatcgaaatgagcaacggctgcatctgctgcacgctacgcgccgatctgctcgaacagatcagtgccctggcgcgtcagcagcgtttcgattacctgctcatcgaatccacgggcatctcggagccaatgccggtcgccgagacgttcgccttccttgacgctgaaggcttcagcctcagcgaactggcacggctcgacaccctggtgacggtggtcgatggcagccgttttcaggcgttgctcgcgtcaccggacaccgtggcccgcgacgatacacaggagaacacctctgcacgccctttggcggacctgctgatcgagcaggtggagtacgccaacgtcattctcgtcaacaaacgggacctgatcgacgagccgggttatcaggccgtgcaggcggtcctcgcaggccttaacccgacggcgcggatcataccgatggcccacggccaggttgagttgacccgcctcctcgacacctatctgtttgacttgcccagccttgcggcgtcgccgggctggatgaggaaaatggaggttgaagacgctccggcctccgagtcggacacctatggcgtgacgtcctgggtgtaccgcgaacgcgcgcccttccacccacaacgcttgctcgatttcctccaacagccctggagcaacggacgcctgttacgcagcaaaggttatttctggctggccagccggcacttggaaaccggcctgctagcgcaaagcggcgcgcagttccagtgggactatgttgggcactggtggaacttcatcgagcagtcgcagtggccgcgggatgaataccggttgcagagcatcatggccaagtgggacagcatcgtcggcgactgtcggcaggagtgggtgttcatcggccaggatctcgatacccacgcgttgcagcgtgagctcgacaactgcctgctcagtgccgaagaaatcgccgccggaccgtcggcctggcgagccctgccgggggccgcggcctttgatgcacaggccctgtcggctcccaggcaggctgaatccatttgacgaggtagaggtgttccatgctctttttcagccgaacccaccgctgggtactgacgccgctcgccgacaggctggagcagcctgaccaggcaagcacgccgctgtcgtcgaataacccgatattgcgccgcatcctggccggcgtagaccaactgctgcaggagcggcgaaccctgaaggaccaaacacgcgcattgggcctggaagtcgcccgattggatcagcgcctggccggccgcgacacacaattgcgccaactggaagcgcacttgaccctgatcacccagggcgccggtgaactgttttgggcgctggaactcgatggaaccactgcccctgcgccggactgtgcgctgcaatggatggggtcggcgtcgatccagccccagggtgttgatcaactgggccgttggagtgaacagttgcacccggctgaccagcaagcgcatcgggaggcgcttacccggcatctggccgatcgcagcgggcgtacaccctttgcgttggacgtgcggataaagcctgcaaccggcgacgactatcgctggtgcaggatcagcggtgagtcgcggcgtgatgcgcagggcctcgcggtcgccatcggtggcagcgtacgtgacattcatgaacaacgcctgcacaacgaaacgctcgaactggcggccacccgtttcgatatttcccgggagatgctgcatgacgggctctgggacatcgaggtggtagcgggcgacccggcgaacccgaaaaacaccatttggtggtcgtcgcaaatgcgccggctgctggggtgcagcacggttgaggagttccccaacaccctggaaagctggacctcacgcctgcatcccgacgatagcgctcgggccatcgcagcctttgtcgcccatgtggacgaccgcagcggccggaccccatttgacgtggactatcgactcaaacacaaaaacggcacctaccgctggtttcgcggccgcgggcaaacacgtcgcgccccggacggctccccgcagagggtggtgggcgccattaccgatatccatgcccaccatgaagaaagtgcgatgcgcgaaacgcaggcgcaacagcatcgggtgatgcaggagaccctcagcaagctgacgcagattgtcgccaccatccagggcattgccagccagaccaacctgctggcgttgaatgccgccatcgaagcggctcgcgccggcgaggccgggcgcgggttcgcggtggtcgccgatgaagtgcgcaagctggccacccgcaccagccaggcgacccaacaggcggccgagatgatagacggctaaccacgtgcccccgcgctgcgggcgtgggcaacgcacatattccaacaataacaatcaggtacgttatgcgcgattacaactcagcagtgagctccttcgattttttacgcttggccgcgcaggatttacagggcgagctgaatgccttgaatgcctgcgtcgaatgctgcgaccgacacgccgacgtaaatgccgtggcgttgtattgcgaaacgcgggatggccgcgccacgcactaccgtttcagcgaactgcaagcccacgctgcgcgcttcggcaactttctgcgggaacagggggtcaagcccggagaccgtgtcgcgggcctgatgccacgcacggttgaactgttgatcgccattttgggcacctggcgtatcggcgcagtctaccagccgctctttaccgcgttcggtccaaaggcgatcgagcagcgattgggctgctccaaggcacgctggatcgtgaccgacgtgcacaaccgttccaagctggacgacatccccgactgcccacgcatcctggtgaccggcgatcatgcatggaccccaggcgattacgatttctggagcgcgctggatcgtcaacacgccgagtgcgcgcccgcgttgctggatgccagcgcgccttttttgctgatgtgcacctcaggcaccaccgggccggccaagccgctggaagtgcctttaagcgctctcctggccttcaagggttatatgcgtgatgccatcgacttgcgtgaggaagacccgttctggaacctcgccgaccctggctgggcgtacggcctgtattacgcggtgaccggtccattggcatgcggccatgccacattgttctatgacgggccgttttcggtggagagtacctgccggatcatcgcgaaatacggaatccgcaacctggccggctcaccgacggcctatcgcctgctgatcgcagcaggggacgcgttcgccgacgccgtgcgtggtcacctgcgtatcgtcagcagcgccggcgagccgcttaacccgcaagtcatccgctggtttgccgaacagctcggcgtggtcatccacgaccattatggccagaccgaaatcggcatggtgctgtgcaatcaccatgggctagaccacccgatacgtgagggatcggccggttatgcgatgccgggataccgcattgtcgtgctggatgacgcccaccgggaattgccgactggccagccaggcgtgctggcggtggaccgcgaacgttcgccgctgtgctggttcaagggctacttcgcgatgccgaccaaagcctttatcagcggctattacttgagcggcgatattgtggagttgaatgacgatggcagtatcagcttcgtcggccgtaacgacgacgtgatcaccacctcgggctatcgcgtcggacctttcgatgtcgagagcgcgctgatcgaacacccggcggtggtcgaggccgccgtggtcggcaaacccgacccgcagcgcaccgagctgatcaaggcatttatcgtattgaatggccagtactcgcccagcgccgaattggcggaagtcctgcgcctgcacgtgcgagagcgcctggctgcacacgcttacccgcgggaaatcgagttcgtcgaacaactacccaagacgccaagtggaaagctgcagcggttcattctgcgcagccaggaaatagccaaacagcaggcactcgacacatgactcacgggcgaatggttcctgtgctgagccgaagggagtttcagcgcagagccctggagttgttcaaggagcgcagtttcagccaagtgagcgtgcgtgaattggcggcgcatatcggcataagcccgggagcggtttatcatcacgtcgagagtaaagaggccatgctgtttgaatggctgatggagctgtatcaggcgttgttgtcgcatgttgatttgatcaaaacgcgaagattgacgcccgcgcaacgcctgacaacactgatcgacgctcacatccaactgtatgaccacatgactgtgcacttcaagttggccgtcatggatgccaattgtctaggcgcagcaatgcaggcacgcgttgagcgattgaagcttgcctatgaggcagaattcataaaatgggtcgaccaggcttgccatcagcctggcgggccgttgcgcgagtgtgcgctcacagccattttgccgatgctcaatagcctgcctgcatggttgagccccatgatcgataacgctcagcgtcgagtgatcgcaaagaccatcgccgaagcagtactacacgcgataaacgcgcttccttccaacacgtcgccctgaacggcgagatgcgctgcgctgggtgatgatagacccacccagctttggcgaaccgtcccgcgggctaagccacctgggtcgcaaacctgccaacggcgtcgaccacccgcttggcaccgtcctgaatttcaacaatcacctggcctgcctgagtggcaagctcaaggccttgctcggcttgggacttgctgtttgccatctcagcgacggtttcatcgaccaacttctgattctgcaagacaaccgacgcgatttcttcagtcgctgtgctggtccgtccagccaattgtcgaacctcatcagccacaacggcaaatcctcgaccttgctcacctgcgcgagccgcttcaatcgccgcattcagagccagaagattggtttgctgcgcgatgctgctaatcgtctggataattgagctgatcaacaatgactgtttgcccagcgcttctactcccccagaggccgcctgcatatcaaccgcgattttacgcatggtatgcatcgtgtcgttgacgacgactgcgcctcgttgagcgctgacatccgtttgctgagatatttcaaatgccgtttgggctgccccgctcacttcatgctcacggtccacttgatcggtcactaccgtcgcgaacttcactactttgcaaagattgccttcggtgtcgtaaaccggattgtaggttgcctccagccacaccgtttgtccgcgactgtctatacgttcgaaccggccagcgacaaactcacctctgttcagctttgcccagaagtccttgtactcctgggacgaagtcagctccggtttacagaaaacacggtgatggctcccttttgcttgtcccaggttgtagcccatggcttgtaaaaactgatcatttgccgtcagtacatgcccagagagatcaaactcgatcaccgcggtagaacgtaacaacgcctcgatgaatgaggcattttccgaggctttttctactcgggacgtaatgtttgtcgcgtagcaagtgatgtggctcagctggccgctcgcgtccatgatgggctgccaatgtgcatgaatccacaccaacgaaccatcggcatgaaggtatctgtaatcgtcgctgatcgacttccccgcggccactgcagctcgaaagttatgaaagcacggcagcttggagacgtactggggaacaatctcggccatggggcgacctacaagccgatccggagcatagcccagcgtatttccaaagttttcgttgcaggccatgatgttaaatgagggatcgatacttaacgtcagcatttcacgatccaggccatcgcgcagttggcgaagctctaacagttcactgttctgagattgaagctgtttcttaaggcttgcattgaacataggaagtcgcctcttgggtcatacctatcgtatcggcgtctcatggcacaaattgagggcgtggaccaagaatgaccgctggccccgtgaggaaatcatctggtccaaggcagttgcggacctgaacatcagcgaaatcaccggggagttttgcgcaggcacaaaaaagccgatctagttgatcggcttaagagtctgattttactcaggaataatggtcgggacggagtgattcgaacactcgacccctagcaccccatgctagtgcgctaccggactgcgctacgccccgactaggcgtgttactgggtttgcttcttgacgaagcgaaccggaatataccgcaagcttttgaaatgtggaagtattttaaaagccggaattactttttcagaaccaccagcacatcttcgagttcggcgatcatctggcggatcatttgtttgtattgggtggtgtcgtctttggcttcatcaccggacatacgctggcgcgcgccgctgatggtgaacccctggtcgtagagcaacgcgcggatctgtcggatcatcagcacatcctggcgctgataataccgacggttcccggtgcgtttgacggggttgagttgaggaaactcctgctcccaatagcgcagcacgtgcggttttaccgcacagagctcgctgacttcaccaatggtgaagtagcgtttgcctgggatgacgggtagctcgtcgttatgacttggttccagcataagcctcaactcgggccttcaacttctgccctggacgaaaggtgaccacacggcgagccgtgatcgggatttcttctcccgtttttggattgcggccaggccgctggcgtttgtcccgcaggtcaaaattgccgaaaccggacaatttgacctgttcgttgtcttccagagcgtgtctgatctcttcaaaaaacagctcgaccaattccttggcctcgcgcttgttcagacccaactcttcgtacagacgttccgccatctcagctttcgtcaaagcccccatacgtcacttccttaacgtggcgttcaacctttgttcgagcgaggtgaggatattttgtgtcgtggtattcacctcatcgtcattaagagtgcgcgatggatgctgccaggtcaagccaactgcaaggctttttctatgcggatcaatacctttaccctgatagacgtcaaatagcctgaggtctgtcagccattcccctgcattttcacgaattacatccagaacggcagtggcggctacttcacgatcggcaatcagcgccaggtcacgacgcacttcagggaagcgcgacagctcgctgaatttaggcattttgcccgaagccacttcagccaggagcagttcgaacacaaataccggacgatcaagaccgagggttttcgacaattcagggtgaatggcgccgacgaaacctaccaaacgcccttcgcgctcaacgcgtgcagtttggcccgggtgcaacgccgggtggctgcctggtacgaaggtgaacgcgtccagtgcaccggcaaagcccagcaccgcttccacgtcagccttgacgtcgaagaagtccacggcatcgcggccctgcgcccaaccttcgggcaggcggctaccgcaaacaacaccggccaacatcggctcttgcttcaagccatccagttgaccaacgaaacgcaggccactttcgaacatgcgcacacggtcttgctgacggttcaggttatgggaaagtgctttcaccaggcctggccacagggacgaacgcatggctgccatgtcgttggagatcggatttgccagcaacagcggctcgacgcccgggttgaacagttcgaactgcttcggatcgatgaagctgtaggtcacggcttcctggtagccacgggcaaccagcaggcgacgcagttcaggcaaatgcgcacgcgcctcggccttaggttgcggcgccagacgcgcttgcgggtaacgaaccggcaggcggttgtagccgtagaggcgagccagctcttcgatcaggtcgacttccaggctgatatcgaagcgatggcttggtacttcaacggtccactgcccttccccgcctgcggaaatacccaggccgagggcggacaacagttgctcgatttcagccggtgcgatcaccaggccgagcatctgctcgacgcttttggcgcgcagggtgatcggcgcaaccgacggcaggaactgttcattgacggtttcggtgattgggccggcttcgccgccggtgatttccagcagcaggccagtggcgcgctccatggcttcacgggcgaggttccagtccacgccgcgctcatagcggtgcgaggcgtcggtgtgcaggccataggaacgggccttgccggcaatagcgatctgatcgaagaatgcgctttcgaggaatacgtcgcgagtggtcgcagatacgccgctgtgctcgccacccatcacgccggcaattgccagggcgcgggagtggtcggcgatgaccagggtatcggcacgcaggctgacttcctgaccatcgagcagcaccagtttctcgccttcttctgccatgcgtacgcggatgccgccgttgatttcggcaaggtcgaacgcgtgcagcggttgacccagctccagcatcacgtagttggtgatgtcgacggcagcgtcgatgctgcgcacgtcagcacgacgcaggcgctcaaccatccacagcggggttggcttggacaggtcgacgttgcggattacacggcccaggtaacgcgggcaagcgttgggtgccagcacgtcgatcggacgtacttcgtcgtgcacagcgggtacagcagcaacggccggacgcgtgaccggggcgttgtacaacgcgcccacttcacgcgccaggccggccagggacaggcagtcgccacggttcggagtcaggtcgacctcgatgctggcgtcttccagttccaggtaaacgcggatgtcctggcccacgggcgcgtcggcaggcagttccatcaggccatcattgccctcgccgacttgcagctcggcctgggaacacagcatgccattggactcgacgccacgcagcttggccttcttgatcttgaagtcgcccggcagctcggcaccgatcatggcgaacgggattttcaggcccgggcgcacattaggcgctccgcacacgacctggaaggtttccgtgccattgctgacctggcacacacgcagcttgtcggcatctgggtgttgctcggtgctcagcacctcgcccactaccacaccactgaaaacaccggcggccggggtaacgctatcgacctcaagaccggccatcgacagacgagcaaccagctcgtcgcgatctacttgcgggcttacccagccacgcagccattgttcactgaatttcatcctgctctcctaaagattcgttacgactagcgaaattgcgcgaggaaccgcaagtcgttgtcgaagaacagacgcaagtcgttcacgccgtaacgcagcatggccagacgctctacacccatgccgaaggcaaagcccgagaattcttccggatcgatgccggacatgcgcaacacgttggggtgaaccatgccgcagcccatcacttccagccagccggtctgtttgcagacgcggcagcctttaccgctgcacatcacgcattccatatcgacttcagcggacggctcggtgaacgggaagaacgaaggacggaaacgcaccgccagctccttctcgaagaacacccgcaggaattcttcgatggtgcccttgaggtcggcgaagttgatgtcgcgatcaaccagcaggccttcgacctggtggaacatcggcgagtgggtgatatcggagtcgctgcggtacacacggcctgggcagacgatgcggatcggcggcttgttcgcttccatggtgcggacctgtaccggcgaggtatgggtgcgcaacagcatgttcgcgttgaaatagaaggtgtcgtgcatcgaccgggccgggtggtggcctgggatgttgagcgcctcgaagttgtgatagtcgtcttcgacctcagggccttcggcaatgccgtagccgatgtgggtgaagaactgttcgatacgttccagagtccgggtgatcggatgcaggccacccgaggcctgaccacggccaggcagggttacgtcaatggactcggcggcgagcttggccgcaagatcggcctcctcgagcgacgccttgcgtgcattgagcacctctgtgacacgctccttggcgacgttgatcagcgcaccgacttgcggacgctcttcagccggcaaattccccagggtcttcatcacctgagtcaattcaccttttttgccaaggtagtgaaccctgatttgctccagggcatttacatcttcagcgctttgcacagcctcaagggcttgagcgacgagcgcgtccaggttttccatgtacagactccagatacaaaataggggaagagcttgaaggctcttcccctatttatgacgtttaacaccttgggctacagagtaacccagggtgactgtcgggggtacttaagccaaggtggctttagctttctcgacaatcgcagcaaacgccgctttttcgttcactgccagatcagccagaaccttacggtcgatctcgatggacgcttttttcaggccagcaatgaaacggctgtaggacagaccgttaacacgtgcaccggcgttgatacgagcgatccacagagcgcggaactgacgttttttctgacgacggtcacggtaggcgtattggcctgccttgattaccgcttgcttggcaacacggaatacgcgtgaacgcgcgccgtagtagcctttagcaagtttcagaatttttttgtgacgcttacgggcaatgacgccacgctttacacgagccatgagttacttcctctattcttgatccaaaaattaacgaaggcgcagcatgcgctcgacttttgccacgtcagacggatgcagcaagctgctaccgcgcagttgacgcttacgcttggtcgacattttggtcaggatgtggctcttgaaagcgtgcttgtgcttgataccgttagcagttttcagaaaccgcttagcagcaccacttttagtcttcatctttggcatgttcggatactccgcattcagttgataaacataatcagaaggcctgccgtgccctgttgattacttcttctttttcggggcgatgaccatgatcagctggcgtccttccatcttaggatgctgttcgaccgaaccgtactcgagcaggtcagcttcaacccgcttgaggagttccatccccagctcctggtgggccatctcacggccgcggaatcgcaaggataccttggccctgtccccatcactcaggaaacgtaccaggttgcgcagttttacctggtaatccccttcctccgtccctggacgaaacttgatttcttttacttgaatctgcttctggttcttcttcgccgcagcaatctgcttcttcttctcgaagatcgacttgccgtagtccatcacccggcaaacaggcgggactgcgtcggcggagatttccaccaggtccaatttggactcttcagcgatacgaagcgcttcatcaatcgagacgatgccaatctgctcgccgtcagcgccaattaaccgaacctcgcgtgccgagatattctcgttgatcggggctttcggtgcagctcgtttatcttgtctcatttcacgcttaataataattactccgaatctgggcgaccacgccgggaaaccgcttgcgcgaggaactcagcgaactgggcgacgggcatcgagcccaggtcagcaccttcacgagtacgcacagcgacagtctgcatctcgacttcccgatctccgataaccaaaagatagggaaccttgagcaaagtatgctcgcggattttaaagccgatcttttcatttctcaagtcggacttggcacgaaatccgctttcgttgagtgttttttcaacctcagcggcaaaatctgcctgtttatcagtgatattcatgatcactgcctgggtcggagccagccacgcagggaatgcaccctcgtagtgctcgatcaggatcccgacgaaccgttcgaacgagccaaggatcgcccggtgcagcataaccgggtgtttacggctgttgtcttcggacacatattcggcgcccagacggatcggcaggttaaaatcgagctgcagggtaccacactgccagacgcggccaaggcaatctttcagcgagaactcgatcttcggaccgtagaaagcgccctcgcccggctgcagatcgtacgcaaggcccgcactgtcgagcgcagcggccagtgcagcttcggcgcggtcccacagttcgtcggagccgacgcgtttttccggacgagtggacagcttcatctcgacgtcggtaaagccgaaatcgcgatatacatccatggtcagcttgatgaacgcggcggattcagcctgcatctgctcttcggtgcagaagatgtgggcgtcgtcctgagtgaagccgcgcacgcgcatgatgccgtgcaacgcacccgatggctcgttacggtggcaggcaccgaattcagccaggcgcatcggcaactcgcgatagctcttcaggccctggttgaacacctgcacgtggcacgggcagttcatcggcttgatggcgtaatcgcggttttccgactgggtggtgaacatgttgtcggcgtagttggcccagtgcccggatttctcccacaagctgcggtcaacgacctggggtgtcttgatctccaggtagccgttctcgcgctgaaccttgcgcatgtactgctcaagcacctggtacagggtccagccgttcgggtgccagaacaccatgcccggcgcttcttcctggaggtggaacaggttcaggcgcttgccgatcttgcggtggtcgcgcttttcggcttcttcgatgcgctggatgtaggccgccagctgcttcttgtcagcccaggcggtgccgtagatccgctgcagttgctcgttcttcgcgtcgccacgccagtaggcgccggacagtttggtcagcttgaaggacttgagaaagcgtgtgttcggcacgtgcgggccacgacacatgtcgacgtattcttcgtggtagtacaggcccatggcctgctcgtccggcatgtcttccaccaggcgcagcttgtagtcttcgccacgggcggtgaacacgtcgatcacttcggcacgcggcgtgactttcttgatcacgtcgtagtctttttcgatcagctggtgcatgcgctgttcgatggccgccaggtcgtccggagtgaaaggacgctcgtaggcgatgtcgtaatagaagccttcgtcgatgaccgggccgatcaccatcttcgcggttgggtacagttgcttgaccgcatggccaatcaagtgcgcgcaagagtggcgaatgatctccagcccctcttgatccttgggcgtgatgatttgcaggctggcatcggaggtgatcaggtcgctggcatcgaccagcttgccgtcgaccttgccggctacggtagccttggccaggcctgcaccaatggatgcggcgacctcggctacggaaaccgaatgatcgaatgaacgttgactgccgtcgggaagagtaatagttggcatggcgcctcctctcctagtggtgacccctaccaaaggtcacgtgggttgggatgagccagtacaagatccaacaccaggccgttcaatgatgaacgcctgccttacagcggcaggagcctttcggccaaccgataatcgaaccagagtgactggagtgagctaaaaagaacatggcaaggcggcaattggcgcgcctggaaatagccaagcgcaagatgctagcacagatgaacggtcatcgcggcgctgctatcttgtgtaacgacaaaatccgcgctttatagccgcaaaagtgaacttgagctgtacgcaatgcctcaaacccactgagaatcgccgttcgtcctcgacccaaaggagcatcctcatgatgcgttttacctctaccctcgctctcgccgcttccctgaccctcctttccctcggtgcacaggcagccgccccgtcgaactggccagccggtgcccgtgacagcttcgtcaacgactgcagcgcagccgccagccagaacgtagacgtcaagaccgccaaagaccactgcgaatgtggcgctgacaaaatcaatgccgaattgagcactgcagaaatcaaggaactcatgaccaacccgaacgccaagcctgagcttaaaaacaaagcggtcgcggctatttcgtcctgcaaagtcgtgaagaaaaagtaagatcggccacagatcagacggctttttatcgggcaaaacagcctgaaaactgccatttctcacaaaatacgcagcttttacggctttttttaccagttgatatttcgagcgaaagccccgtagatcggggctttcagccgggacaggtattaaacgcaacgctattgattagcaaacaatgccttgggggggctcccaagccgaacatttcgactatgatagcccggtgtgcccagttggcctgagcagcacagcactactgaaaatatatgtttcttggagatacaccatgtctaatcgccaaaccggcaccgttaaatggttcaacgatgaaaaaggcttcggcttcatcactcctcaaggtggcggtgacgacctgttcgtacacttcaaagctatcgaaagcgacggtttcaaaagcctgaaagaaggccaaaccgtttccttcgtggctgagaaaggccaaaagggtatgcaagctgcacaggttcgcggcgagtaattctccgctgagctaaaaaaaccccgtccatgtgacggggttttttatgggcactgcaaaagccttgagagacttagccgcaattgacccgcgtgatcaccaggttgtcatcggtgttcaggttgaggcggtcggagcggtattccagggtgatcatgtcgttaggcttgaggatacgtgcgttctgcgcaccggcacgggtacgcgcctgttccagcaactggggcgaggctttctggccgatggtgaattcggcggctttcgactcacagcggctatgaccggcatcggccacggcggcgtctttggctggctcagaggcacccggggtgctgcaacccgccaatgcgagtgccgccaacaaagtaccgaatgatgcgagcttccaaggcatgaagcctcctatgataaaaaatggacagagatcgtgcgacagcgattgggcggattggtttcaagacgtaaaccgccgccgggcaagtttgcctgagtcgggacaggcattcgcccgctcaatcgtgaccggatatgaatgtgctcagtagatgtcgatgtagtcgaatgccggcttcggccagttttccttcagagcattgaagatctgtgtcacccagacttcatcactggcggcaacattacctacgtatccggagcccttggcccaggtctccaggcgaaacagcaggccgtcgatatccacgccacctacaacccttcctgaagagatataggcgattccggccttggtcacccgcaactgggcatgttcgtcgtcactggcactggcgagaagctggcgcacattcgccagtgtcaggttctcggggttgttcaaatcgatctgcacgtggtgtccccggcaattaaacaggcggacagtgtcgcacagcagtaacgtcatgccgaaccgccccatgcctaagtatcagtgccaaacgcaatgcaaaatgtttaactggccgggtaagaaccgcgttccagcgcattgccctgtattttcagccccgtgagaccttcatgaccaccgtaacgctccaagccgatatcaaagccaagtggccccaaggacaaagctcatacagccccggcagcccagaggaattggcgattatcggcatcgacctgctggtcaaggaactgggtacgcaggcagcgcaagcgttcatcggccagatattcgagaaatacccggccgatcacatgggggcacacgaccccgagcgcgaataagaaccggctggcgcacgccgaccggtcaacccattacttcagacgcgccaggcgctcggtcagcagatcgaagaagccctgggcatcaccgttctccacccagaacgcgttcttcggttgtttcaggccgtcgtaccagtcgacgatggtctggccgaaggttggaccttcacggctatccaccaccacattgacttcacgaccgctgaacagcgaaggcttgagcaggtaagccacgacggtggcgtcatgcaccgggccgccgggaatgccgtagtgctccatgtcgcccttgacgtattcattgagaatatcgccaaccaccttgctcgcgttgttcttgaggtcggcgatctttttcaggcgggcttcgctggtcagtaccttgtgggtcacgtccagcggcaggtaagtcagcttgacgccgctcttgagcacaatttcagccgcaaccgggtcggcgaacaggttgaactccgccaccggcgtgatattgccgccgttgaagtgcgcgccgcccatcacaacgacctccttgatgccctgggtgatttccggtgcctgggtcagcgccagcgccaggttggtctgcgggccgagcatcgcgatggtgatgctgtgcggcttggcagtgctgagggtcttgatcaggtaatcaaccgcattgccgtcagccaggccctttttcggctcatgcacggtgacgccggaaatgccttccttaccgtgaatattctcggcgtagatcggcgtgcgcagcagcggtgcgggcgcaccagcgtacaccgggatgtcctcgcgccccgcccactcacgggccaggcgtgcattgcgggaggtcttgtccaggcgcacgttgccggcgacggtggtgagcgcgcgaatgttcagctcatccggggaggccatggcgaacagcaatgcgaccacatcgtcagcacctggatcggtgtcgatgatcaggtcgattttttccgccgcctgggcgcttgcagcagtgagcgcagacaaaagcaggacactccggaacaggtttttcagggttggaagaccatattgcataaaacactccttgtcgttgagaacgctagaacgttacgccggacaccagcgcgatattgcagtagggctggcattcaccggtgcgcactaccgcgcgcgcgttgtgagtgagctgcttgaattcgtcatggctgaccagacgccgctcaccgatggccgcctgttctgtgagcgcattcagctcggccaaagccggtggttgcttgagcaggatttcttccgccagcacatggcgttcaacctgcatctcgctgagcacgatacgcaaggtgctgatgaaatccgggatgccctgggtcaacgccaggtcgatcagctcgacacccggcggcaccggcaggccagcgtcaccgatcacgaggatgtcaccatgcccaagcgaggcgatcacgcgcgacagggcaatattgagcagaggtgtctttttcatgagggcacaaaaccttgtacgtcgtgcagcgttggaatagagggttgcgcaccggcgcgggtgaccgacaacgccgccgcgacctggccaaaacgaatggcctcggcctcgctcttgccgttggccaacgccgccgcaaagccaccgacgaacgtatcacccgctgccgttgtgtctaccgccttgaccttgggcgcaagcaggtgctcgaaattcaggccgtcggtaaacagtgcgccctgggagcccaaggtaatgatgactttgccggcgcccgcctggatcaggtgggtggccgcagccttggcactgtcaatggagtcgacggccacaccactcagtgcggcagcttcgctttcattgggtatcaggtaatcaatcgaggcgtaccactcagccggcaacggcgcgctggccggtgcagggttgaggatcaccgtcttgcccagctcacgaccgcgcttgagggcatagcccaccgtattcatcggcacttccagctggcagacgatcacctcagccgcctgcagcaccgcatcaaacgcctgcaatgaggctggcgtcagttcgccgttactgcccgccacgatcacaatcgcgttctggctgctgtcatcgaccacgatcaaggccacgccactggaaccgtccacggtgctgacggcctggcaatcgatgccttccaccaccaacgcatcgcgcaactggatgccataggcatcgctgccgacacagccgatcatcgacacatcggcccccaagcgtgcggaggctaccgcctggttcgcacccttgccaccaggcacggttgagaatgtctggccgatcaaggtttcaccggcacggggcaaccggctggcacgggtgaccaggtccatgttcaagctgcctattaccactacttttgctggcatacatcagtactcatcaattcggttcagcggtattgggcgaacgtaccggagacaggtgccgtcgactcacgcaacacgatgctcggcgtcacgatgcgttgatcaatcggcatttggggtgttgcaattcttcgcagtaaaagttcggccgccgtctcgcccagttgcacgatcgactgcccgaccgtggtcagcgccgggtagacgtaacggctcatttgaatatcatcgaaaccgatcaccgacagctcacccggtacgcggatattgcgctctgccgctgcacgcaacacgccaaaaccaatcatgtcgttactggcaaaaatcgcactgggcgggttttgcgccagcaaatgcacagcggcggcataaccgcccgtgctggtgaaatcgctttcctgggtgcggttggcggccacctcgacaccggcctctcgcagcgcacggtgatagcccgccaaacgcatttgcgcgacacgggtatgggcagggccgccgatgcaagcaatgtcgcgatggcccagttcgagcaagtgccgggtcgccagataggcgccctcctcgtgatcgatacgcaccaggtccacatcaatgccatccagcgcccggtcgacaatcaccatgggcgtgcgcaccgcgctcaagccagcggcaaggccactgtcgtcaccgcccaccgaggtcacgatcaagccgtcgacgcgcttttccaacagcacgcgcaaatagttgcgttgcttttcagcattgtcgtcggagttgcagaggatcacgcagtagccgttacgctcgcagtaatcctcgatgccgcgagccaattccgcaaaatacgggttgaggctgttgggcaccagcaaaccgatcgtggccgtggtcttggccttgagtgagcgcgcgacggcactgggcacatagtcgagctgcttgatcgccgcttcaaccttgatgcgcaccggctcactgaccgggcgagtcttgttcaccacatgggacaccgtggtgtaggaaatacccgcaagcgctgccacatccttgatcgttgccataggtcagccccgccgactggcgcgctggctgcggtaggtgtcgaggaccacggcgatcacgattacggcaccggtgatgatgcgcttggtcggttccgtggccccgatctgcgccaggccagccgccagtaccgaaataatcaacacaccaaagaaggtactgatcaccgagccgcgcccgcccatcaggctggtgccgccgatcaccactgccgcaatcacttgcagctccaggccggaaccggcgttcgggtccgccgcttccaggcgcgaaatctggaacagcgccgccacgccggccagcaggcccatgaggctgaacaccaggatcttgtaaggttttggattgatccccgccaggcgcacagcctcttcgttggtgccgatgccgatcaggtagcgaccaaacacagtgcgggtgagcaccagctgcgcggcgatgattaccagcaacgcgatgatgaacgacggtgaaataccaaaggcaatcgggttggacagccaggcaaacgaatccccgatgtaagcggtgcgcgagccggtcatctggtatgcgacgcctcgggccatttccagcacgccgagggacacgatgaacgatggtatgcgccaggccacggtgatcgagccggtgatggtaccggccaacgccgcgcagcccatgcccagcacggcagccggcaacacgctccagccccagccgaggatcgctacgctgacggccgatgcagccagtgccagcaccgagcccaccgacaggtcgatcccaccgatgatcaggatgaaggtcatgcccaccgccagtaccatcaggtccggaatctggttggccagggtgctgaaggtgtcataggacaggaagtgatcgctgagcaccgagaacagcgcaatcatcgccagcaaggcacccgcaagacccaggtaggtgcccaggccatagaagttgccgccggtcttgccaggggaagttgtggttttcatggggtatccctaagcactgcgtcgttgagcagcgcatcacgtttctgatagccagcaaaggcggcggcgagcaattcgtcctgggtccagctgtcgcgctcgaaggtctcgatcaagcgcccggcggacaacacgccgatgcggtcgcagatcagcatgagttcacgcagatcactggacaccaccaccagcgctttgccctggcgggtcaattcgcccagcaaggcataaatatcgaacttggcacccacgtcgatgccgcgggttggctcatcgaacagcatcaccgagcagtcgcgctccagccagcggccaatcactaccttctgctggttaccgccggacagttcggaaaccaactgcgccggactggaactgcggatgcgcatggcgtcgatctgacgcttggccaaggcggtctcgtcgcggctgctgaccacgccaccgccggagatttccggcatgttgcccagggcaatgttggcgctgatggactgggtcagcagcaggccctcacccttgcggtcttcggtgatcagggcaataccgtggcccaccgcatccacgggcgagcggatgctcaccacctgggctggcgaaccaagcgccacggtgccgctgtcggccaggtcggcgccgaagatcaggcgcaacaactctgtacgaccggcacctatcaggccggagataccgtagatctcaccggcgcgcacttcaaaggacacgtcgcggaccttgtccgagcgagtcaggccttttaccgtcaaggccggaccaccaatggagcgcgggcccaggtcgatgtgctcgcccagctcacgaccgaccatcaaggtgaccagttgctcactgttgtaattggccatcggctcgacacagaccagtttgccgtcgcgcagtaccgcaatgcgctgggcaacacgggccagctcttccagccggtgcgaaatgtaaatgatcgccacgccccgggcctgcaagcgggtgatttgttcaaacagcatctcgacttcacgggccgtcagcatggccgtgggttcgtcaaggatcagtacgtggcagtcgccgatcaggttgcgggcgatttcgaccatttgctgatggccaatacccaggctgccaaccagcgtgtccggatcgatggcatccagcccgacctgggccatggcctcgattgcagccttgcgcagttgcttgcggctgatccagccacagtggctgggcaggttatccaggaacaggttttcggcaacagtcagtgtcggcagcaggttgagctcctgcatgaccatacgcacgcccaactcttcagcctgggtgcggctgccagggcgaaaatcctggccgttgaactgcatgtgcccggtagtcggcgtgaccagcccgccgatgatcttcgacaaggtacttttgcctgcgccgttctctccggtcagcgccagcacttccccgcgattgagcgtcagggtgatgtcggacagaaccggttgggcataggtcttgccgataccgctgaccgagaggacagcgttcggggcggaagatgacataggaaaatctccaggcgcccgcccaggacgagcgggcgctgttgggtgctgccaggattacttcttgaggacgagttcgaccggggtttcgatcacgccatctttggcatcgactttctcacccttgaccagcttgagcgcattctggataccgaacacggcttgctgggcagcagcctggtcagcggtcgccaggacacggccgtcctgcagcatcggcttgatggcttcgatgttgtcgtagcctacgaccagcaccttgccagccttgccggccgcgcgcacggcagagacggcgcccagggccatgttgtcgttaccggccagcagggccttgaggtcggggtattcactcagcatggcggatgccactttctgaccctggtcgatttcccagttgccggattgggtggagacgatcttcatgccggcagcgtccatcgcatccttgtagcctgcggtacgttgctgggcgttggtggtcgtcggaacaccctcgatgataccgaccttgtcacccgaggccagttgcttggccaggtagtcgccgaccagcttggagcctttgcggttgtccgggcctacgaaggggatgtcgaggttcttgcttttgagcacgtccgggtccaggcggttgtcgatgttgacgaccttgataccggcgtccgaagctttcttcagcacggtgacaagtgccttggagtcggcaggcgcgatgacgatggcgttgaccttggcgaggatcatctggttgacgatgtcgatctgcgcactggtatcggtttcgttcttgatcccgttggtgatcatgtcgaaatcggtggcgtgttctttctgatacgccttggcaccatcctgcatggtgacgaagaattcattggcaagggatttcatgaccaggccgaccttgggtttggcggcgtcatcggcaaatgcagaggagagaggcagggcagcagatgcagcagcaagcacagcgacagcaagaagacgtccagcgaatggcagcttcatgggttcactccgatcttatgattattgtgagcaacgcttgcaccgaagaccccttcggcagccttcccacccgggcggctgatacgagctgtcacgatactcaaggagtgctccgtgaaacatctcgcaaacgtttgcgttattcaaactatgagaaccttgtcgagatttgtcaacggttgaaaacagcctttcatccacgccctccctcccgcttgagcataggtgcagttaaacatcgcaccctctcggtcgctccttaaaacgacaggctggtgcgcatcattcatgcatcccccaaagcctggcggtcaactttttcggacaaccgaacacaatgcagtccgatgttcggaaagccggacacccacattatcaacaaacccgaaaaatcaatattaattgttataaatcaatcatttaaattgttttagcgatcacgctgagcctggtacagatcctgctctaccccatcacctcgtggcattcagaaccgcccgggtgttctagatgaacctgctacagcactcatcaaaaaccagagagaaaaataatgaaatctgcactgaagacttttgttccgggcgcgttagccctcctgctgttgttccccgttgccgcccaggcaaaggaagttgaaaccaagaccaaactgtccaacgtggtgatcctcgccaccggcggcaccattgctggcgccggtgccagcgcagccaacagcgccacctaccaggcagcgaaagtcggtatcgagcaattgatcgcgggtgttcctgagcttagccagatcgccaatgtgcgtggcgagcaagtgatgcaaattgcgtccgaaagcatcaacaatgaaaacctgctgcaactgggtcgccgcgtcgccgaactggccgacagcaaggacgtggacggcatcgtgatcacccacggtaccgacaccctggaagaaaccgcctacttcctgaacctggtggagaaaaccgacaagccaatcgtggtggtcggttccatgcgaccaggcaccgccatgtcggcggatggcatgctcaacctgtacaacgctgtggccgtggccggcagtaaggatgcacgcggcaaaggcgtgctggtcaccatgaacgacgagatccagtcgggtcgcgacgtcagcaagatgatcaatatcaagaccgaagcgttcaagagcccatggggcccactgggcatggtggttgaaggcaaatcctactggttccgcttgccggccaagcgtcacaccatgcattcggaattcgatatcaagaacatcaagagcctgccggacgtcgagatcgcctatggctacggcaacgtgagcgacactgcctacaaggccctggctcaagcaggcgccaaagccatcatccacgccggcactggcaacggctccgtgtcctcgaaagtcgtacctgccctggtggaactgcgcaagcagggtgtacagatcattcgctcttcccacgtgaatgccggcggcatggttctgcgcaacgccgaacagcctgacgacaaatacgactgggtcgctgcactcgacctgaacccgcagaaagcccgcatcctggccatggtcgccttgaccaagacccaagacagcaaagagctgcagcggatgttctgggaatactgattcctgactgcccccctgtaggagcgagtttgctcgctcctacaccctcacgctccgccctacatccaattgcctgaattgctgtaagacgaacttcttgaattttaagtagttgcgaaatcacctacagttaaatactgtatgtgcgtacagcttattaaggaatactccgtggcaaagtcctcttccgcagtgcccaccgcacctgatgcctacgaacgcctggctattcgcgtgcaaaagatcatcaattcaaccaacgcccagaaagccaaggcagcgttgatattccgtttgccggacgagcctgaggatgaatgggcgcgcttactggaggaaatcgcagagaacgacaatgtcaccctcgcctatcgtgacgacggtggcgtacagattttctgggttgtaccgaaggaagattgattcaatgattgtccgttttatcgcggtgtgctgcctgttttttgccgtcaccgcccacgcccaggcgccacgcacgttcagtgaagccaagaaaatcgcctggaagctctacgctccacaatccaccgagttctattgcggctgcaagtacacgggcaatcgcgtggacttgaaagcctgtggctacatcccccgcaaaaacgccaatcgtgccgcacgcatcgaatgggagcacattgttcccgcctggcagatcgggcatcagcgccaatgctggcaggacggtgggcgtaagaactgcacgcgccatgatgacgtgttcaagcgcgccgaagcggacctgcataacctggtgccaagcatcggcgaagtaaacggtgaccgtaataacttcagctttggctggctgccggtacaaagcgggcagtacgggtcttgcctgactcaagtggatttcaaggccaagaaggtcatgccgcgcccttccatccggggaatgatcgcccgcacctatttttatatgagcaaacagtacggcttgcgactgtcgaaacaggatcgccagttgtacgaagcctggaacaagacctacccggtgcaggcctgggagcgccagcgtaaccagacagtggcgtgtgtgatggggcgcggcaatgagtttgtcggcccggtgaatctgaaagcctgtagttgaaaatgggcgaaactcccgcccacccggcgcgttactgtgcagccttgtgctcgacaacctgcgattcagtatcggttttcttggcgcgcgccattttctcgttgagcagtgcttgcttggcctcggcttcagccttggtcgcgaacggccccagcaggacttcgtccttgccgtcaaccttcacgatgtaaaagttgaaaccatgttccagcaaccaggccgtaaggtcggtgatggcctgtagcttgtggtccggcggccctacccatacatcccattcctgggcagcaatcgcgccggtttgcggctgggtttcggtcacggcaggcttgctcctgggggcctcgacgcgtttgccctcaccgcaaccggccaatgccaacaccgccattgccatcgctactttacgcactgccctgctcctttaaagataaagaggcgactttatcattcactgtctattctggccgtcataaacgttggcttaaacaatgcgaatcatgtatcgcagacctgtatgatgccgccatgggaattaatgtcgcctctatgcgtcctaaaaagaggcagtcacagggaagcgcttagcagtaagctacacacatccgacacctgccctgtctgaaacatgtgtccttaaaagtaatcaaggagaagtccatgctgatactcacccgcaaagttggtgaaagcataaacatcggtgatgacatcacgatcaccatcctgggcgtcagcggccagcaagtacgaatcggcatcaacgcacccaaggatgttgccgtgcatcgcgaggaaatctaccagcgcatccaggccggtttgactgccccggacaaaaaccagacgccttgaagcgccctcagtagccagccctttcgtacactgtaatggctggcgaaaacctcttcacaccgctcttgtcattgctgcgtgactgacgccaccaatgcgttcatcttcatggaaagatgaaactgtcttcacgcccggaacttgttgtttcattctcagccgaatcttctgactgacactcagccatccgtgtgcattcaggagcacgtcgatgcggcccagacccccaccgccatttgcctacacgtcttggatgatcgccttatcgataggatgggtcttcgcagggctggcctatggtttgaagtatgcaatcgaaggctccggctccaccgcccctcgttcagggctggacttggcgctgctgctttgcgggtacttgttcctgttttgtctcaaacctatccagaagtccgtgcaacgcaggttgtgtcggcaaacgcttcagtgacatcgcgctcatcgccagtagacaccggcatcaacagcgtcacagcgcgagcttggccttttcgtatcagcccgcccccctctgcaagtacaacaagccgtccgcgtcacgctgtacgtctaactgctgatacccgtctatcgaaggatggtcagtggtcataggcgtgtgatgcgtcgacgtcacgaccatcacatccgcgcctgcggcctctcccgcacgaatacccaccgttgcatcttcaaacaccaggcattcatgcaccggcacacccaggcgttgcgcccccaaaacgtaacaagccggattcggtttgccgagggccacatcttcagccgtcaccaataccgccggcggcgcaatgcccgcggcttgcagtcgacgcaacgccaactcccttggagcagaagtgaccaacgcccattgatcacccggcaggcggttcagaaacgccacggcgccggaaatcgccacaacaccttcgacatcattgatttcagcctcggtgatccactgcgcttcaacctcaggatcgacgcccggcaaggcctggcgtgtgatggtgtcgatcgcgcgggcaccgtgaatagtcgtcaagaaagccgccacatccaggccatgacgttcagcccagatgctccacacccgctcggcagcggcaatggagttgagcaaggtcccatccatatcaaacaaaaaggcacggtaacggcgattgaacacggctgaacctcggatagacactgagcgaattcctcatgagcggaaaaatgataggcccgatgcaatctacggatcgccttggtgcttgtaaacgctaccgaggtcgattgcattacaggtttgtaatggagcggtaagccttaccagcaccctcacttcatacagtggagtcgtcagtcacccacaccggatgacgccacttcctactgatgaaaagggtccccccatgaagcctgcaagcaaactctgcctgatcgccgccagcctgctgatgctgggcacaggtaccgccatggccggcaccgtggcgccggtcaaagccaataacgtggtgctggtgcacggttcctgggctgacggctcaagttggtccgaggtgatcacccgcctccaggccgccggtctgcatgtcactgcagtacaaaacccgctgacctcggtggccgacgatgtcgccgccaccaaccgtgtactggcccagcaagacggccccactgttctggtcggccactcctacgccggcaccgtggtcagcgacgccggggccaacccgaaggtcagcgccctggtgtacgtggccgcacgcgcgccggacgccaatgaagactttgtcgcgctctcggcaaagtatccgagcatgccggtgcgggccggcgttgaagaccacgacggctacctcaccctgagccaggaggccttcctcaagtattttgccggcgatgtgccgcatgccaaggccctggagttgtacgccgtgcagcagcccatcaccaagaccctgttcagcggtcgcactgtcaacgccgcctggcacaccaagccttcctggtatgcggtgtcggcgaatgaccagaccatcaatccagacctggagcgcttcctcgccaagcgcatgaacgccaccaccatcgagctgccttcgagccacctgtcgctggtgtcccacgccaaggaaatcaccgacctgatcctcgaagcctccggccgccagccctgagccctgcattacaaacttgtcatcatcctgttggttggctgttcggggtgcctggttactgtgaactcaacgccacgatctggcagccaaccccttaagagagataccgccatgaaactgtttatcctcggctttgccgctctgctcgctaccggttccgtgtttgcaactgaacctgtgatccatgacaaaaccggcttcttcgtacacctggatgtggccaaagtgctgtcgagcaccgacacctacggccaatgcggcattgtcccggcgcgcctcgactacctggacagccagggtcgcgaacatgtgttggactaccaggtccagggcatcggttgcgccagtgacaattgatcgggctacacttgcgccacgcattgagacggggcacttcccatgaacattcttgtagtcgaagacgaacccaaggccggcaattacctgctcaacggcctgcaggaactgggttactccgtcagcctcgcccgtgatggcgtggacggtttgcaccaggccctggaaacaccgttcgacgtgatcgtgctggatgtgatgatgccgaaaatggacggctgggaagtgctgcgtcgcctgcgcaaggaagcggatacgccggtactttttctgacggctcgcgatgacattgccgaccgcatcaagggcttggagctaggtgccgatgattacctgatcaagcctttttccttcgctgaactggtggcacgcttgcgaaccctgacccgtcgcggcccaagccgcgaagaggaacaactgcagatcgccgacttgcaaatcgatgtgctcaagcgtcgcgtcacccgggcaggcacccgtatcaccctgaccaacaaagagttcgccttactgcacctgttcgcaactcatcaggaccaggtgctgtcccgttcgctgatcgcgtcgcgggtgtgggacatgaatttcgacagcgacaccaatgtggtggacgtcgctgtacgacgcctgcgcctgaaaatcgacgaccctttccagctcaagctgatccacagcgtgcgtggcatcggctaccgcttcgatacccaaccatgaacacacgccgtcactactccctgaccctgcgcctggcgctgatcttcgccctgctcgccttcgccctgctggcgaccctcggcgtggcgctgtatcgcgagttggagcgtgaactgatcatgcgtgacgacgcagccttgatctaccgcatcgatcaattgcgcaacctgctcaatgacagcaacaccctggacctgatcaagaccaagccggagttgttccagaacatgctcggcaaccgcgagtcagtgctgagcatcgccgcgccaggccagaagcccctgctgacggtcaaccccggcaatatcgacctgccagacgttccgccggtccccaagaaccacgaactgacgttcgccgacgtgcaccattttcccggcatcaatggggtaccctttgcaaccctggccgcgtccatcgactccggtgacctgggcagcctgcaagtcaccacggggcgcctgatgaccgaacgcaccgccgtactcgccagctatcgcttgagcgtttatatcctggcgagcattgctgcaattatcctggcagtggtcggttacctgctggttcatcgtgggctggtgccgttgcgccgcttggcccggcacgcccagggcattggtgtcggcaaccttgccgaacgcctcgacagccacggtgcgccgaaagaactgctgccgatgatagattcgttcaacaccatgcttgagcggctggccaagggctttgtgcaactgggccaggtgtccaccgacatggcccacgaactgcgcacgcccatcaacaatttgctgggggaaacccaggtcgccctgcaacagcaccgcagcattgaaagttaccagcagttgcttgcgtccaatgtcgaagagcttgaacgcctggcgcggatgctcgacaacatgctgttcctcgcgcgcaccgacccggcgagtgctttgcgtcaacgccaggaactcagtgccgtggatgaggtggaacgcatcgccgagtactttgagggcttggcgggtgatgtggatatcagcattcgtgccgaaggtgaaggcgtgatctgggcggagccgatgctgctgcgcagagccctggcaaatctgtgtgccaatgccatcaaatatggtgcaccgagtaccgagctggagatccgcgccgtgccaagcgccgagggcattcacctgagggtcagcaaccaaggagagaccatcgccgccgagcatctgccgcgcctgttcgaacggttttaccgagtggatgagtcacgggaacgttcggcgcagtccaacgggttggggttatcgattgtggcaaccatcatgcaactgcacaacggacggtacagcgtgagcagtgaggcaggcgtgacgtgttttgagttgttctttccgaaacgggaagattgagcgcaaacgcccggtgttattttgcaaaggtttgtctcttaaccgctcgacgcaagccaggctaattttgcttcccaatgggctcaaggtagagccggcagcggtaaaacaatggagattccaaaatggaaatgcgattaggcttactggaaaaggggctggctgaaatgaatgagaagctgatcaccgtttcgagcaaggcagacgccatggataagcacttcgcttccaaggcagacctggcaactactgaactgaaccttatcaaatggtacgtggcaaccgcattcgccatgacaggcctggcttgcgctatcaccttcgggcttactcgactgtttgcgatttgaggagcgtcgggccgatcagctgacctgcccgcccgcttcctctgcatccacccgtgtttgccacgccaccagcacagctgtctgcagccccgcaaccaacgtatccaacgccattgagggccgctgtgaatctgccacctgctctggcagaaaaggtacgtggataaacccactgcgtaccccagaacctgcgagcgcatgctgcaacaaataaaacacctggttacacacaaatgtcccagccgtctgcgataccgaggccgcgactcccgcctcacgcacggccttgaccatcgccttgatcggcaaggtcgtgaagtaggccgccgggccgccgtctacaactgccgtatcgataggttgctccccgaggttatcggggatgcgtgcatcattgacattgatcgccacccgctcgattgagatatcgctacgcccaggccccaggccagtcgcaattaccatcgccgggtgcaactcttcgatcagcccggccaggcacgggcccgctgtggcaaatgcgcaaggcagtcgacgcgcaacaatctgcacgtcgctgcccagctgcacgccgtccagttggcgcacggcttcccaggaggggttgaccgggtcttgatcaaagggctcgaaacccgtcagcagaactatttgcataacggcctcacatcaacaggtaaagcagcacaatattgaccaccagcatcatcaacgcggtcggcagctgagccttgatcaccgcgttcttgtccggcagctcgagcaatgccgccgggacgatattgaagttggcggccataggggtcatcagggtaccgcagtagccggagaacatgccgatcgccgccatcaccgccgggttaccaccatagatgccgaccagcaccggcacgccgacaccgccagtcatcaccgggaaagccgcgaagccattacccatgatcaccgtaaacaacgccatgcccaacacgtagaccatcaccgccaccaacttgtaatccaggttgatataagtggtggtgacatgcgcgacagccgtaccaaccccagcttcgttgaacagtaagcccagcattgccaacatctgcggcagcaccatggcccagcccagcgcttcagtcaggcgacgggattcacgcaaggcttgcaccggcgtatcgcgggtcaaccagcacgccaggccaagggcgatcaggcagccgataccaagggagacaaaggtggtgtttttcgggtccagcaacggcactccgccaatctcggtgtgcttgagcaataccgagccgatcaccgtggtcagcggaatcgccaacgccgggatgaacagcttgtgccccaggcgacccgcactggcacgggatgccttgtcgtgcaactcggcatgcttgccacggccgacgccgcccatgccggcaatcaaggccatgaccactatgcctaccccgatagccaccgaaggcagacgctcaccgatcaggaatggaatggcgaacaacagccagaacaatgcactggaccaacgcttgggatgggtgcggtccatcaggatcatgcaagccgtgatcagcagcaggaccccggccagccagtacaggtattgaatggaaataatcattgtgcagcctccacggatgcagctgccggcgtcatctctcgggtgagcctgcggtcaaaccgatgcaggcggatcgcgtgaatgatgaaggcgcagatcgcggtaggaatcccccacaccgcaatatgcagcggctccacatcaatccccgaccccagcaggaaggtatgcatcaaggcgattgcaccaaaggcgacaaagatatcctcaccaaaaaacaggccgacattgtcagtcgccgcgcacatcgccagcactttatgacgcagtttgtcaggaagtttgccgtagcgtttttccgctgcaccctcagccatcggcgccagcaacggacgcaccatctgcggatgcccgcccaggctggtcaggcccatggcagccgtggattcacgcacaaacaaatagatgatcaacaaacgcccgaccgtggcgcgctcgaaccgtgcaatccagttctgcgcatgcaggcgcaacccatggcgctccaacaggccaatgaccgccagaggcagcaacagaatcaattgcagggcacgggtctgaaggaagccatcgcccatggtggcgaggattttttccaggggaaaatgggcggcaagcccggtagcgatagcggccgcggtgaccaccaacagagggttgatgcgcaaaacaaagccaaccacgatcacaagtacgccgatcaacggccataagttcacaacagtttgcatggcggtgaggtccttaagtgcgcgctgcggcgccattacagcaggatgtgaacaaagggttcacagcaggaagtggcgtgcagtcggctcggttttttattgttgacccggaaggtcgagcgtcagtggcggcaactttgctgcctggggacgggaggtgtccaacaagaaaaattgttgctgcgaaccaataaattttgtgggtgattgcacagcatgcatgtaacgagatgtggacagacccgcagggattcgcgcatcttagcgccgcctgtcttatcaggcgtgcacctcaaatcagcacactcttcccgattactgttgtggatatggaaattcaatgaaaacccaaaaggtcctgatcgccctctcctgcgcagttgcgctgtccatgctgggtggttgcgccgccaaggtaaaaagtggcggcagcgcagcgctggcgatcccggactccgcgaaacacaacctcgtggtcagcatcaagggcgaaggccaggtcgagcaaaacccggactggaacctgctcaagcgtgactggaacaacgcgctgcaagtggaggcccgccaggccggtttcaacgtcactgaaagccctgcagtggttccgagtggtgaagaaggtgtcggcatcaagatcaatgtgagcaagtttcgctacatcgagccgggctcacggtatgtagccggcgcgctggtaggtaacgcctgggtgttctcccgcgcagattactcggacctcaaatccggcacgccgattggctcgcgcacctacgacacctcgtcatccgcctgggaaggcattgcctcggccatgacgcagaagcaggtgcaggcgattgccaaacagatgatcagcgatatcaagaacgccaaagccaagtaagccgccatcgtgagcgagtttctcgaattcatctggaagctgcttgagttcgcaggcgactacaccccaccacggcgaaaacgcgtgttctcactcgggttcgtgatgtttttgctgctggtggcggttgttgaactggtgttgctgcagatttttcttggagatacgggctgaagagagggtttgcaaaagttttgcaaatcgcaggcaacaaaaaagggcccacctttcggtgagcccttctagaccgcccagcagagcggattttgtttggtaggcgcgattggactcgaaccaacgacccccaccatgtcaaggtggtgctctaaccaactgagctacgtgcctgctgtgaggcggcattctacggaattccggaggggtgtcaacatcttttttgcagctaaccctatgaatatgcgaattttttatttacgcggggcacacccgcggatttcgggtggctggcaggcaattttcaactcaggtaggatcggcgcactcgtaaaaaatataaaacagaggttccaggatggcgaacaccccctatccccagtcgtattacgccgcttccgcgaatgccgttccccctcgcccggtcctgcaaggcgaagtcgaaaccgatgtgtgcgtgatcggcgcaggctacaccggcctctccagtgcgctgttcctgctggagaacggttttcgcgtaacggtgctggaagccgccaaggtgggttttggcgcctcgggccgtaacggcgggcagatcgtcaacagctacagccgggatatcgatgtgatcgagcgcagcgttgggcccaagcaggcgcaactgctggggcagatggcgttcgagggcggcaagattatccgtgagcgcgtggccaagtatcagattcagtgcgacctgaaggacggcggtgtattcgccgcgctcaacagcaagcatatgggccacctggagtcgcagaagcgcctgtgggagcgctacggccacactcaactggagctgctggacgaacgccgtattcgcgaagtagtggcctgtgacaactacgtcggcggcctgctggacatgagcggtgggcacatccacccgctcaatctggcactcggcgaagcggccgccgtggagtccctgggcggtacgatctacgagcaatccgctgccgtgcgtatcgagcgcggcgccaacccggtggtgcataccgccgagggcaaggtcagggccaagttcatcatcgtcgcggggaatgcctacctgggcaacctagtgccggagttggccgccaagtcgatgccgtgcggcacgcaagtaatcaccaccgcccccttgggcgacgagctggcgaaaactttgctgccgcaggattactgcgtcgaagactgcaactacctgctcgactactaccgcctcaccaacgacaagcgcctgatcttcggcggcggcgtggtgtatggcgcacgcgacccggcaaacatcgaagcgatcatccgcccgaagatgctcaaggccttcccacagctcaaagacgtgaagattgactacgcttggaccggaaacttcctgctgaccctgtcgcgcttgccgcaggtaggtcgcctgggcgacaacatctactactcacagggctgcagcggccatggcgtgacgtatacgcacctggcgggcaaggtactggcggaggcactgcgaggccaggcagagcgttttgacgcgtttgccgacctgccacactacccgttcccgggcgggcaactgttgcgcacaccgtttgcggcaatgggcgcctggtactatgggctacgcgacaaattgggattctgactcgaacctgcaggagctcgtttgcgggctcctccaggttgcattatcaaatcgcagacacaaaaaaccccggtctttcgaccagggtctttgctatcggatcaaagtagccagaggcttgctttgtgctccaaggcgttcagtgggccttgaggcagatatggcgcagcggacgggactcgaacccgcgacccccggcgtgacaggccggtattctaaccgactgaactaccgctgcgtatcgcttgaccggttgatcgtaaaccctcaaccgtctttaaacatctgattgatcagccttggctgttcaatctcaagtccgacacatcgaacctggataatatggcgcagcggacgggactcgaacccgcgacccccggcgtgacaggccggtattctaaccgactgaactaccgctgcgcgtcggtgcaacctttaacgttgcgtcttgccctgaagcaaaactctcaagaagtggtgggtgatgacgggatcgaaccgccgaccctctgcttgtaaggcagatgctctcccagctgagctaatcaccctttgcttcgttgaggccgcgaaatttacgcaggtagcagacctaagtcaatagcctgcttgaagtttttctgaaaaagacaaaattgcttcaagacggctatccgccctactcgctgtaaatcatcttcttgctcatgccaccgtccacgacaaactcttgcccggtgacaaaccccgcctggcgcgacagcagccatgccaccatcgccgccacatcttccacggtccccaccctacccgccggatgctgggcgtgatcggcgtcactcaacggctcggcacgccgggccgccgggtcacgcgcatcgatccagccggggctgaccgcattgacccgcacttccggccccaggctcatcgccagggcgtgcgtcagggccagcaggccacccttgctcgccgcataggcctcggtgtccggctccgactggcgagcccgggtcgacgccaggttgacgatggcgccgccgtgggcacgcagatacggcgcacagtgcttggccaacaacatcggcccactgaggttcaccgccagcacccgattccagtacgccaggtccaggctttccagcgtgatgttacgcgggtcggccaccgccgcgttgcagaccaacgcgtccaggcgcccaaactgccccaacacctcggcaacaccctgggcgacttgcttctcgtcggccacatccatgctgataaaccaggcgttgtctcccagtaccttggacaccttggaaccgcgctcgcggtccaggtcggtcaacaccacctgccaaccttcgctgatcagccacgcggcaatcccgaggccaatgccgcgcgcagcacccgtcaccagcgcgacacgcccgttactggccgctgccgcttccatggaccactcgatcacaaggccgccagcccgcgagccaggtcagcttgcaagtcagccacgtcttccaggcctaccgcgatgcggatcaggctgtcacggatacccgctgcctcacgctcctgcggcgccaggcgaccgtgggaggtggtgctcgggtgggtaatggtggtcttgctgtcacccaggttggcagtgatggagatcaggcgtgtcgcatcgataaagcgccaggcgccctctttgccgccctttacttcaaagctaaccacagcaccgaaaccacgctgctgacgctgagccaattcgtgttgtgggtggctcttgagaccggcgtagtgcaccttctcgataccgtcctgttgctccagccactcggccagggcctgggcgttggcacaatgggccttcatgcgcaggctcagggtttccaggcctttgaggaagatccaggcgttgaacgggctcaaggtcgggccagcggtgcgcaggaagccgacaacttccttcatctgttcgctgcgccccgcaaccacaccgcccatgcagcggccctggccgtcgatgaacttggtggccgagtgcacaacgatatccgcgcccagcttcaacggctgttgcagcgccggggtgcagaagcagttgtcgaccaccagcattgcgcccttggcgtgcgccacttcggacaacgccgcgatatccaccagttcggccagtgggttggacggcgactcgacgaacagcagcctggtgttgaccttgatcgccgcatcccagccggacaggtccgccaggggcacgtagtccacttcaatgccgaagcgcttgaagtacttctcgaacaggctaatggtcgaaccgaacacgctgcgcgacaccagcacatggtcgccagcgctgcacaggctcatcaccaccgccaggatggctgccatgccggtcgccgttgcaaccgcctgctcagcgccttccagcgccgcgatacgctcttcgaacgcacgcacggtcgggttggtgtaacgcgaatagacgttgcccggcacttcgccggcaaagcgcgcagcggcatcagccgcagtacggaacacgtagctggaggtgaagaacatcggatcaccgtgctcaccttccggggtgcggtgctggccggcgcgcacagccagggtatcgaaagctacgccatcgaggtcgctgtccaaccgaccggcatcccattcctgactcatgctgccactccttactcgattctttatttaagatacaaaaccggcccctcagggccggttgtcactcagttgttgtacaggtcgatgatcgcgctgaccgcctgggtcttgatcttcgacgagtcgttgcgcgcctgctcgatcttgttcaggtaggcctcgtcaacgtcgccggtcacgtacttgccgtcgaataccgcgcagtcgaactgctcgatcttgatcttgccaccgccgaccgcctcgatcaggtctggcaggtcctggtagatcaaccagtcggcgccgatcaggtcggccacgtcctgtgtcgaacggttgtgcgcgatcagctcgtgggcgctcggcatgtcgatgccgtacacgttcgggtaacgcacggcaggcgctgcggaacagaagtagacgttcttcgcaccggcttcgcgggccatctggatgatctgcttgcaggtggtgccacgcacgatggagtcatccaccagcatcacgttcttgccgcggaactccagctcgatggcgttgagcttctggcgtaccgacttcttgcgcgccgcctggcccggcatgatgaacgtgcggccaatgtagcggttcttcacgaagccttcgcggaacttgacgcccaggtggttggccagctccagcgcagcggtacggctggtgtccgggatcgggatcaccacgtcgatatcatgctcgggacgctcgcgcaggatcttctcggccagcttctcgcccatgcgcaggcgtgccttgtagaccgaaacgccgtcgatgatcgaatccggacgcgccaggtagacgtgttcgaagatgcacggggtgagtttcggtgccacagcgcactggcgggtgtgcagcttgccgtcttcggtgatgtacaccgcttcgcccggcgcgaggtcgcggatcagggtaaagcccagcacgtccagggacacgctttcggaagcgatcatgtactcgacgccttcgtcggtgtgacgctggccgaacacgatcgggcgaatgccgtgcgggtcacggaaaccgacgatgccatagccggtgaccatggccactaccgcgtaaccaccgacgcaacggttatgcacgtcagtcacggcggcaaatacgtcttcttcggtcggctgcagcttgccgcgctgggccagctcgtgggcgaacacgttgagcagcacttccgagtcggagctggtgttgacgtggcgcaggtcagattcgtaaatctccttggccagttgttcaacgttggtcaggttgccgttgtgcgccagggtaatgccgtaaggcgagttgacgtagaacggttgagcttcggccgaagtcgagctaccggcagtcggataacgcacatggccaatacccatgtgcccgaccaggcgctgcatgtgacgctgatggaacacgtcacgtaccaggccattgtccttgcgcaggaataaccggccgtcgtggctggtcacaataccggcagcgtcctggccgcggtgctggaggacggttagcgcgtcatacagcgcctgattgacgttcgacttaccgacgataccgacgatgccacacatgcgacgcaacccctacttaatgaatcttgactgaacacaacttactgaggcgttttggccggcaagaggtgttccttgaacggaagatcagcgggtacgctgattccgctggccagccactgactgctccaccccagaatgaggttcttggaccagtctgcaaccaatagaaattttggcacgagtaccgactcctgccaccacgaatcctgctgtaccggccccaggctcaacagcccgaccgccacgaccaccagcaacgcgccacgcgcggcaccgaaggccatgccgagaaatcgatcggtcccggagaggccggtgacacgtatcaactcgccaataagataattgaccattgcccccaccagcagcgtggcgatgaacatgatggcgcagcccgcgatgacgcgagccgaaggtgtctcgatgtatccagccaggtagaccgacaatgaaccaccgaacatccaggctacgactcctgcgatgatccaagtcagcaacgacagtgcttccttaacgaagccgcggcttagactgatcaaagcggagatggcgacgattgcaacaatcgcccaatcaacccaggtaaatggcacgttgtagcctacggacagatgaggcggcgcattttagcagagcgtcgggctgtcggtaagctgtgattgtggctgccttgcaaatcagtagtttgggacgagtgaatccaatttcaagcacaccccgaaacaactgtgggaggggtaatccccctcccacacttgaccgcatttcaaactcaagccgctgcgaaatcaaccgcgctcaggctggaaccgggtcacgaaacccttgaggttctgctggcgatccagcaaatcgcgcaggcgatccgcctcggcacgctcgatcagcggcccgataaacacccggttcttgccatcggcactacggatataggcattgtagccttggctacgcagcttcttctgcaacgcgtcggccccctcgcggttacccagactggccacctggatcgaccaactgaccggcaagccattcggatcgatgcggctctggccgacgtccggcttgcctggcgcggcaggctgcggcgcaaccggcttgggcgcaggtgcgggcgcagcaggcttggccgctacagtcggcgcaggcgccggcttcaccaccggcacacttggctgtaccggcatcgacggtgcctgctgtgcagccacctcatcattggtcggcacgggctcgtcctcgggtaacgcctggggctcaggcaccaccaccggctgaacctgcacctgaggcactgcaggcgcctgcggcgaggccggtgcctcgacaacgacctgacgctcttcatcctggcgggaaaacagcatcggcaggaagatcaccgccaatgccaccagcaccagggcaccgaccattcgctgcttgtatgcgctatccagtaatgccatgtgcagcttcctccgtggagcgccgggccaaccactcaagcgcctcggcaacacaataaaatgacccgaacaacagaatctcatcgtcgggcgtggcaatggcgcactgtgcttcaagggcatcggtgacgcttgcatacgacgtcacgggcgcagcaaggttctgcaaggccacttccagctcggcggccgggcggctgcgcggcgtatccagcggcgcaacagcccaggcctggacacgacccagcaagggcgcgaccacaccgtccaggtccttgtcggccagcaggccgaatacggcaaggcgttggccgaccggcggcgtgcgtgataggcgttgcgccaggtactcggccgcatgggggttatgccccacatccagcagcaggttcagccgcttgccctgccattcgaattcacgacggtccagacgtccgacgacgcgagtcgccagcaaggtggccgagatctgctcgacattccacggcagatccagcagcagataggcttgcagcgcgagcgcggcgttttccatcggcaggttcagcaacggcaaatcgcgcagttctacggcctggccacgcgcatcgcgcccacaccattgccagtgctgatcaccgatctcaaggttgaattcgcggccccgcaggaaaaacgggcaatccagctcacgcaccttgtccagcaaggtgtacggcgggtcaatgtcaccacacagcgcaggcttgccctggcggaagatcccggccttttcataggccacggactcacgggtattgcccaggtagtcggcgtgatccaccccaatactggtgaccaacgccaaatcggcgtccaccacgttgaccgtgtccaggcgcccacccaggccgacttcaagtaccaccacatccagttgcgcacgctcgaacagccagaacgccgccagggtgcccatctcgaagtaagtcagggagatctcgccccggcccgcatcgagtgcggcgaaggcttcgcagagttgctcgtcggtggcttcgacaccattgagctgcacccgctcgttgtaacgcagcaggtgcggggaattatagacgccgactttcagcccctgggcctgcagcagcgccgcgacaaaggcgcaggtagagcctttgccgttggtaccggtcaccgtgatcacgcgcggcgccgggcggcccaacccgaggcgggccgctacctgttgcgagcgctccaggcccatgtcgatggcggacggatgcaactgctcaaggtaggcgagccattcgcccagggtacgttgggtcataggtttgcaggcaccggcggtacgacgatcggctcgactttaggcgcgacgtacaccggggtcggcaggcccatcatttgcgccagcaggttacccaggcgtggacgcaactcaccgcgcgggatgatcaggtcgatcgcgccgtgctccagcaggaactcgctacgctggaaaccttccggcagtttttcacgcacggtctgctcgatcacgcgaggaccggcaaagccgatcagcgccttgggctcgccgacgatcacatcacccagcatggccaggctggcggatacgccaccgtagaccgggtcggtcagcacggagatgaacgggatgccttcttcacgcagacgcgccagcaccgcagaggtcttggccatttgcatcagggagatcagggcttcctgcatgcgcgcaccaccggaggcagcgaagcagatcatcgggcagcggttttccagcgcgtagttggcggcgcgaacaaagcgctcaccgacaatggcacccatggagccgcccatgaaggagaactcgaacgccgacaccacgactggcatgcccagcaatttgccgctgacggagatcagcgcgtctttctcaccggtctgcttctgcgcggcaaccaggcggtccttgtacttcttgccatcgcggaacttcagacggtcaaccggctccaggtcggcgcccagttcgttacggccttcggcgtccaggaagatgtcgatgcgggcgcgggcgccgatacgcatgtggtggttgcacttggggcaaacgtccagggtcttttccagctccgggcggtacaacaccgcgtcgcaggatgggcacttatgccacagaccttcaggaaccgagcttttcttcacctcggaacgcatgatcgaagggatcagtttgtctactaaccagttgctcatgctttctttctccagtaccggtggcttgaacacagccccgcgtatgcccttgagctaaattcatatgtggcgatgacacaggctggacggggtcagacgttcgaccggccttttcctgcctgtatcctcagccttccagacaacctgccagcgcagggttgccacttcgtttccgggccaccacaggcggcgccgggctgttttacacagtggtagttatggacggcggcagactgccagccgtcacattgcaccactgctgttgcgcacggcctgcatgaatgcgcgaatcttgctgtgatccttgatgcccttgccctgctccaccccgccgctgacatccacggcatacggccgcacctgctcgattgccgccccgacattcgcggggttgagcccgccggccaggatgatcggcttgctcaagccagcgggaatcagcgaccagtcgaacgcttcgccggtaccgccgggtacgccttcgacataggtgtccagcagaatcccgcgagcaccaccgtaggcggcacacgccgccgcgatatcatccccggccttgacgcgcagcgccttgatgtagggacgctgataactttcacattcgtcaggcgtttcgtcgccgtggaactgcaacatgtccaagggtacggcatccagggtttcgttgagttcgcagcggctggcgtcgacgaacaaacccacggtggtcacgaatggcggcaaagccgcgatgatcgcccgcgcctgcaccacattcaccgcccgcgggctcttggcataaaacacgaaaccgatggcatccgcccctgcctcgaccgccgccagcgcgtcttctatgcgggtaatcccgcaaatcttgctgcgaacggctgacatgtcgtgaaaactccagggttggaccgagaaagtcccggatggtaacaaaagctattccgggcgtcagccgccaagttcgctgaaacctgtgaggaagtgtggcccgatgaagcgctccggcaactcgaactcgtcgcggtactccacatccaccaggtacaggccgaacggatgtgccgtgaccccacccgtgcgacgaacgcggctttccagcacttccttggcccactccaccgggcgctcgccggtaccaatggtcatcagcaccccggcgatgttgcgcaccatgtgatgcaggaaggccccggcgcggatatccagcacgatcatcttgccgtggcgggttacccgcaggtggtggacttccttgatcggcgacttggcctggcactggccggcacggaaggcgctgaaatcatgcacacccaccaggtgctgcgcggcctcggccatgcgctcggcatccagcgggcggtggttccaggtgatttcttcgttgaggtgcgccgggcggatctggtcgttgtagatcacatagcgatagcgccgggcgatggccttgaaacgcgcatgaaagtgcgctggcatgaccttggcccaactgacgctgacgtcatggggcaaattgatattggcgcccatcacccaggccttcattgaccgctcagcctgagtatcgaagtgcaccacctggccacacgcatgcacaccggcgtcggtacgcccggcgcacatcagcgaaaccggtgaattggcgactttcgacagggcattttccagggtttcctgcaccgtcagcacgccggatgcctggcgctgccagccgcgatagcgcgagcccttgtattccacgcccaaggcgatgcggtaaaagcctgcggccgccatttcggcggtcgggttatctatatttgccaagaactgagagcctgatgagttgcgcaaaggcggccattatgccggtttgcaggggagcccacaaaagcaaaacggcgacccgaaggtcgccgctgtttgaacaacgggctgttacgccaaccggccgagcatttccttggcctcgccgcgttgaacctcatcgccttcggtcaacacttcggaaaggatatcccgcgcgccgtccgcatcccccatgtcgatataggcctgggcgaggtcgagcttggtggccacctcatccgtgccggagaggaagtcgaattccggctcatcatcgcccagcgccgcgtcttctgcggtaaaggacggctcaatggacggatgctccaggctctgggacaggcgatccagctcggcgttgacatcatccagctccgacgtgaaagcatcgggcttggcggcggcttccggctcatcagccagggacaggtcgaaatcttccggcaaatcgaagtcatccagcgccgcaggcgtgagggtcggcggctcgacggccggcacgtccttcatctgttcgtccaggcccgaaaggaagtcgtcatcggattgcgccgaagccggggcatccagttgcaggtccagatcgaagtccgacaggtcatccgggctggccttggcttcggtctgctgctgcagcagcgactcgaacgtctgctgatcgcccttgacctcggccggggacgcctgctcaagctcgtcgaggctcagatcgaaatcagtgtcaaagacctccggctgcgcaggcgcaggtttgtcttcgagcaaatccttgacgtactgagcgtccagggcagctgcagccacggcggcgctgacacccgccgccaacaccgccatggccgggaagcgactcttgagctgttcgacctgggcatggttttcaccattggccaccagttgacgctcctgggtcacaaagccgtccttgtcgttttgcaggccgtagacttccatcagcttcaagcgcaggtcgctgcgcttgggctcatgcttgatcgcttgctccagtacgtcggctgcctggttcaggtgaccacggtcgatatgggactgggcttgggccagcgcatcgtttgagttcaccggagccacggcaaccgccagcggcgccagtacggaagcaacggtcggcacaacaaccgccggttcaaccaccggagccggggccggtgcggcggccagctttacgctgggcggcggcgtctccagaccttcgaagctgctcggcggcaggtcgtcatggaggttcgaggtgaactccggttcttcagccagggcccgcgccatgcgcaggtgtttttcctcttcgcggcgcgcattgcgatggcgcgcccacaacagcaggagcaacaacaccagtaaacccgccgcaccgccgatcacgccgagcacgatcgggttggtgagcaggtcattgaatttgccgtcggcgctggccggtgccgcgtccgccttgaccggctcaggcgctggcgcgacgggtgcaggggtgacggcctcgggcgtagcaggtgcagtggatggctcgcctgccaactgggcaggcattgctgcagtcgccggagcagccgggacacccttttcagcctgcaaacgcgccagttgatcgtttttcagttgaatcagtttttgcagcttgtccaactggctttgcaggtctgccgcgcggcttttcagctcttcgttgtcgcgtcgggtggtgtccagttgctcctgggtcatcgccaacttgtcgctgagtgccgcgctgtcgcccgccttgcccttggcgcccttcttggcggcttcggccgacaccaggctcaagttgtccttggcgttggtgcttgcaggcgcgttgcctgcctgggtgcgcttggtggcgtccagttgctgtttgcccgctgccgggttggtggcggcgcgtcgaccctggcgccaggcggcattttgcgcgctcacctcagcaattgcctggggttgcggcagcgcagtgctttgtacggcgtccggcaggcgcaggacctggccggttttcagacggttgatattgccgtcgatgaacgcattcgggttcagcgcctggatcgccagcatggtttgctgcacggagccaccattgcggtgcttctcggcgatttcccagagggtgtcgcgggacgtggtggtgtgctgtgccggtttgctcgcggcaggcgcggtgctggccggtgcggccagacgcggcgcaggcgcggcggtcgtcggtgccggctggtcgaacttggccgggtcgagcaacacgctgtagtcacgcatcagacggccattcggccattgcacctgcaacaggaaacgtacgtaggagtccggcaacggcttgctggaggtaacacgcaccacgctgcggccattggggttgatcaccggggtgaacgtcaggtcactgagaaacgcctggcgatcgacgccggcgtccacaaatgcctggtcagaagccaggcttggcgtgatctcggtagcggtgaggccaccgacatcgagcaattcgatttccaccgccaacggctggttcaacttcgacttgagggtcatctcccccagctgcagcgcctgcgccataccggaggacagcgccgaggcggccgctattgctaacaccagtttgcgaacttgaaccatagcctcatcctttgtttgaacactccccggcctgcgagaaggttggtaaccgctgccataaggcatggcgagccgataggtcaccgacgcgcaacttttcctgcctggggccaagcatagcgcctggctagaatcaatctacaaattgccgccaagtatcttttacgcaaggccttttatcaacaactgcgccagctgtactgcattcagtgcggcgcctttgcgtacgttatctgacgtcagccacagatttagttccgccgggtcatccacacctgcccggacgcgaccgacgtagaccacatcctggcccactgcatcgccgacggctgtaggaaaatccccttcatctacgagctcgatgctcggcgcagcctcaagtgcgcggttcaccgcagccagatcgaccgccgcgcccagttgcaaggacactgtcaggctatcgccaaaaaacaccggggcttgaacgcaggttgcggaaatctttagcaaaggtaattccagcactgcgcgcaactcgtggaccaggcgtttttccagggccgtatgcccctgagcatctggcgtgccaacctgcgccaacaggttgaaggcgacctgccgatcaaagaacttcggctccagcgggcgcatattcagcagctcggcggtttgccgggccagttcgctgacggcttcacgcccctgggccgacatcgccaggctggcggtgacgctcacccgctggatatccagcaagccccgcaaaggcgccagcaccaccgccaggttggtcgccgacgggctcgggctgccgagctggaacggcttcttcagaccttccagcacgtgggcattggcctccggcaccacctgcggcgcctgctcggccggcaacgcaccggataagtcgatcaccgagcaccccgccgccgtggcacgcggcgcaaaactcagggtgacagccggccccgccgcaaagaacgccagctgcgccttgctgaagtcaaattcgtcgacttccttgacccgcacattcttgccgcgaaagggcacggaggcgccggccgagttgttgcccgccagcaaatacagggtgcctaccggaaaatccagctcttcgaggatctgcaccagggtttcaccgacggtgccggtggcgccgatcacggcgatttcaaaggtctgggtcatgggggctgcctcgggcattgcggggggagcggcactttaccgggtgactgggggtgaggcaattaagctgggatttgtggtggggctgatggccttatcgggggcaagccccctcccacactcgaacgggttcacaggtcaaaatgtgggagggggcttgcccccgatgaagcccgaccaaacaacaaaaaacccgcgcctgtcatcagaacgcgggtttctctcattgccttacgcgatcaacgctccagcaaaatccgcaacatgcgacgcaacggctcggccgcgccccacagcagctggtcgcccacggtgaatgcaccgaggaactggctgcccatgttcaatttgcgcagacggcccaccggcacattcagggtgccggtgaccttggtcgggctcagctcctgcatgctgatatcacggttgttcggcaccagcttgacccaggggttgtgctggctgatcaaggcttcgatatcgctgatcggcacgtctttgttcagcttgatggtcaacgcctggctgtggcagcgcatcgcgccgatacgcacgcagatgccgtcaaccgggatcgggctcttgaagcggccgaggatcttgttggtctcggcctgggccttccactcttcgcggctctggccgttcggcagttccttgtcgatccatgggatcaggctaccggccaacggcacgccgaagttttcggtcgggtaggcatcgctgcgcatggcttcggccacgcggcggtcgatgtcgaggatcgcgctggccgggtcggccagttgatcggcgaccgcggcgtgggtcgcacccatctgcttgatcagctcacgcatgttctgcgcgccggccccagaggccgcctgataggtcatggcactcatccactcgaccaggccagcttcgaacaagccgcccaggcccatcagcatcaggctgacggtgcagttgccgccgacgtagttcttggtaccggcatccaactgctggtcgatgaccttgcggttgaccgggtcgaggatgatcaccgcgtcatcctgcatgcgcaggctcgacgcggcgtcgatccagtagccctgccagccggcttcgcgcagcttggggaagacttcgctggtgtagtcgccaccctgacaggtcagaatcacgtcgagggttttcagctcttcaatgttgtaggcgtccttgagcggagcaatatccttgcccacggacggcccctggccacccacattcgaagtggtgaaaaacaccggctcaataagatcgaaatcctgctcttccagcatccgctgcatgagcacggaaccgaccataccgcgccaaccgatcagacctacacgtttcatcgcaactacaccttgttaaaaagtgggccgccttgcagcaacaactgcaagcgggcccgagagattacagattccgcagcgcggcgactactgcgtcgcccatttcttgcgtaccgaccttggtgcaaccctgcgaccagatgtcgccggtgcgcaaaccctgatccagcaccaggctcacggcctgctcgatggcatccgccgcatcgctcaaattgaagctgtaacgcagcatcatcgacaccgacaaaatggtcgccagcgggttggcaatgccctggcccgcgatgtccggcgccgaaccgtggcacggctcgtacatgcccttgttattggtgtccagggacgccgacggcagcatgccgatggaaccggtgagcatcgacgcctggtcggacaggatgtcgccgaacaggttgtcggtgacgatcacgtcgaactgcttcggcgcgcgcaccagctgcatggcggcgttgtcgacgtacatgtggctcagttcgacgtcggggtagtccttggccacttcctcgacgatttcgcgccacagctggctggaggccagcacgttggctttatccaccgagcagaccttcttgccacgcacgcgggccatgtcgaagccgacacgggcgatacggcggatttcgctctcgctgtacggcaaggtgtcgtaggcctggcgctcgccattttccagctcgcgtacaccgcgtggcgagccgaagtagataccgccggtcagctcacgcacgatcaggatatccaggcccgccaccacttccggcttgaggctcgaggcgtcggccagttgcgggtagaggatcgccgggcgcaggttgccgaacaggctcagttgcgcgcggattttcagcaggccgcgctcagggcggatgtcacgttcgatcttgtcccacttcgggccacccactgcgccgagcagcacggcgtcggccgcgcgggcgcggtccagggtctcgtcggccagcggtacgccgtgcttgtcgatggcggcgccgccgatcacgtcgtggctcagttcaaagcccaggctgtacttgctgttggccagttccagcaccttgaccgcttcggccatgatttccggaccaatgccgtcgccagggagaatcagaatctgcttgctcatgggttcctcatttcatcaagcgacccgcccgtgggcaggtcgggaaaaatcaatcagcgttcggcaaacaccaccagcacgtcggtgctgaaggtgccgtcggcttgaatttcgtaataatcacgcacttcctggcccatcgccttttgcagctcaaggatcgcggcgcgcaggacctgcggcgtgcgcatgcgctcgacccacgaggtgtattccaggcgcaggcgctggcgactgctggtgcgcacatgcaggccggactcgctgagctgctgcatccactcggcggcggcgtagtcgcgcacgtggctggtgtcgcgcagcacttcgacggtttgcaggtaagtgtccaacagcgggctgcccggtgacaagacatccacgaaagccgccacaccacccggcttgagcacccgacgcacttcacgcaaggccaggccgaggtcgctccagtggtgggccgagtagcggctgaacacgaagtcgaactcgccatcggcgaacggcaggcgctcagcggcgccgttcacggtgcggatgttgtccaggccacggtccgtggcagcggcggcgaccacgtcgagcatctgttgggacaggtcgtaggcgaccacttccttgaccagtggcgcaacgtggaagctgacatgaccggcaccgcagcccaggtccagcagtcgcgcaccgccctgcccggccagttcggcctggagcagcgcgaattcggtgccctgggcgtgcacggcactgctcaggtaggcggaggcttgctcgccgaattgtttttgcacgacttgggtgtgggcggtggtggtcatggtggtttccttgggttttggggtgttggtactggcgctatcgcaggcaagccagctcccacagttggaatgcattccaatgtgggagtcgggcttgcccgcgatggggcccgcacggttaccgccaatcaggcatcgcgaaacaaccaaggctggctcgcccggtgcctggcttcaaacgcggcaatcgcatcgccgtcctgcaaggtcaggccgatatcgtccaggccattgatcaggcaatgcttgcggaaggcatccacctcaaagtggtacaccttgccatctgggcgggtcacggtctgcgcggccaggtcgacggtcagttggtagccctcttcggcctcaacctgcttgaacagctcgtccacttcggcatcgctcaagatgatcggcagcaagccgttcttgaagctgttgttgaagaagatgtcggcgtagctcggcgcgatgatgctgcgaaagccatactcttccagagcccatggcgcgtgttcacggctggaaccgcagccgaagttttcccgggccagcaagacgctggcgccctggtaacgctcggcattgagcacgaagtccttgttcagcgggcgcttggagttgtcctggtaggcgtagcccacgtccaggtagcgccactcgtcgaacaggttcgggccgaagccggtgcgcttgatcgatttcaagaactgcttggggatgatctggtcggtgtcgacgttggcgcgatccaaaggggcgacaaggccggtgtgttgggtaaaagcacgcatcgggtaatcctcagatcaattcgcgaacgtcgatgaaacgaccgttgacggcagccgcagcggccatggccgggctgaccaggtgggtacgcccaccggcgccctggcgcccttcgaagttacggttggaggtggacgcgcaatgctcacccgactccaggcggtccgggttcatcgccaggcacatcgagcagcccggctcacgccattcaaaaccggcttcgaggaagatcttgtccaggccttcggcttcagcctgcgctttgaccaggcccgagcccggcaccacgatggcttgcttgatggtcgaagccactttgcgacccttggcgatcaccgccgcggcgcgcaggtcttcgatccgcgagttggtgcaggaaccgatgaacacgcgatccaactggatgtcggtaatcgcctggttggctttcaagcccatgtacttcaaggcgcgttcgatggaaccacgcttgaccaggtcggcctcctgagccgggtccggcacgttctggtcgacggccaggaccatctccggcgaagtgccccagctgacttgcggcttgatctgggcagcgtcgagctcgaccacggtgtcgaacaccgcatcggcgtcggagaccaggtctttccaggcttcgacagcggcgtcccaatccttgccttgtggggcaaatggacggcccttgacgtattcaacggtcttttcgtccgccgccaccatgcccacgcgggcgccggcttcgatggacatgttgcagatggtcatgcggccttcgatggacaggtcgcgaatcgcgctgccggcgaactcgatggcatggccgttaccgccggcggtgccgatcttgccgatcacagcgagcacgatgtccttggcggtcacgccgaacggcaactggccttcgactttaaccaacatgttcttcatcttcttggcgaccaggcactgtgtggcgaacacatgttccacctcggaggtgccgatgccgtgggccagggcgccgaacgcaccgtgggtggaggtgtgggagtcgccgcagaccacggtcatgcccggcaaggtggcgccctgctccgggccgatcacgtgcacgatgccttgacgcacgtcattcatcttgaattcggtgatgccatattcgtcgcagtagtcgtcgagggtctgtacctgcaaacgcgacacctggtcggcaatggcttcgatgccgcccttgcgctcaggggtggtcggtacgttgtggtccggggtggcgatgatggagtcgacgcgccaaggcttgcgcccggccagccgcaggccttcgaacgcttggggcgaggtcacttcatggatgatgtgacggtcgatatagatcagcgacgaaccatcgtcgcgccgtttcacttcatgggaatcccaaagcttgtcgtaaagcgttttgccggccatcagtcggtcctcatcagcggtgtttctctatgccgggcttttcaataaccctttggcttgtgaggctgatggtatggcgctacattaaataactcaaattcatattttttatgctttggattaccaactggaatacaaccatggacctggccaacctcaatgcttttatcgccatcgccgagaccggtagcttctcgggcgccggtgaacgcctgcacctgacccagccagccatcagcaaacgcattgccggcctggagcaacagttgaaggtgcgtttgttcgaccgcctgggccgcgaagtcggcctgaccgaggccggacgggccttgctgccacgcgcctatcagatcctcaacgtgctggacgacacccgccgcgccctcaccaacctgaccggcgaagtcagcgggcgcctgaccctggccaccagccaccatatcggcctgcatcgtttaccgccggtgctgcgcgcattcacccgggaatacccgaatgtggcgctggatattcagttcctcgattcggaagtggcctacgaagaaatcctccacggccgcgccgaagtggcggtgatcaccctggcacccgatccccacaatctggtgcgcgccaccccggtgtgggacgacccgctggatttcgtggtggcgccggagcacagcctgatcagcaacggccacgtcagcctggccgatattgccgggcacccggcggtgttccccggcggcaacaccttcacccaccatattgtcagccggctgttcgaggcccagggcctcacgccaaatatcgcgatgagcactaactacctggaaacgatcaagatgatggtgtcgatcggcctggcctggagcgtcctgccgcgcaccatgctcgatgatcaggtggcaagtatcgctttgccgggcatacaactcagtcgccagctaggctatatcgtgcacaccgaaaggacgctgtcgaatgctgcgcgggctttcatgagcctattggatgcacaggtcgatctgccagggataccggcatgaaaccgtgcggcctccaggtctgaactgaaccgcgccttacgcccatcgagccaaggccctttgataatgcgcaaccccgtcgactccgtgccacccctgccccgcatttacgccctggaccctcaagaggcggaacaaagctgggacagtgccccgcaactgctggccgcgctcaatgctgcccggctgggcgcctggtgctgggaaatcgacaccggcaggataagctggtcgcggggcacccaggcgctgttcggctttgacccgcgccagccactgcccaaggacctggactacctcgacctgctcgcgccacaggatcgtgcccgcgtggtgcgggcctttcacgcggtattggccggcgagccgttcgaacaggcgatgcatcactatatccagtggccggacggcacccaccactggctggaaatcaatggcagcctggcacctgacaaagccgggcggcggcgcatgatcggggtgatccgcgagaccacccgccagcgcgaacgggagcacgccctcagccactcggaaaaacgcttcgccacgctgtttcacctgtgccccaacatggtcttgctgacgcgccagtccgacggattgatcagcgaggccaaccagtatttcgagatgctcttcggctggccggtcgccgatgccatcggccgcaccaccctggacctgggcctgtggcgccatccggaacagcgtgcgcaactggtcaaggcgacccagcgcaaaggcctgcccatcaccatggaggtgcagttctgcgccagcaacggccagatccacgacggcaccctcagcgcacaaaaggtggagttggacggcgaggcttacctgctcagcacgttcctggataccacagagcgcaaaatagccgagcaggccctcaaggacagccaggaacgcctcgacctggccctggactcggcgcaactgggcacctgggactggcacatccccaccggcatgctctacggctcagcccgcgccgcccaattgcatggcctgccgccggagccgttccatgagttcttcgacgccttctttgacggaatgcccaatgacgagcgcgagagcatgcgcaacgcttatcgcaccctgcgcgaaggcccggccggcaactatcagctgacgtatcgcgtgcccatggaagacggcagctcacgctacctcgaaagccgcgcccgcctgtaccgtgatgagcacggcgcgccgctgcgtatggccggcactctgctggatatcaccgaccaagtggaacgcgaacaacgcctgaccgcctccgaagagaaatttgccagcctgttccaggccagcccggacccgatctgcgttacctgcctggagggcggcgcgtttatcgaaatcaaccccgcgtttacccagacctttggctggacggctgccgaggtcatcgacaaaagtgccgagcagatcggcctatgggacgagtcgagcaagcgcctgcagcgtatcgagcggatgatccgcgagcaggcattgaacaatgtggcgatcgtggtgcatcacaaaagcggccaaagcctgacctgcgtgatttccagccgcctgatcaaggtgggcgaccagccgtgcatcgtcaccacgctacgcgatatcacccagcagcagcgctcggaagcggcgctcaaggccagcgaagagaaattcgccaaggccttccattccagccccgatgccatttccatcactgagcgcgacaccggtcgatatgtggaggtcaatgacggcttctgccgcctgaccggttatcgcgccgaggaagccatcggcctgacgctgtatcagatcggcatctgggccgatgaaaaccagcgcgccgcgctgctggccgagttgcagatcaagggccgcattcatcatctggaaatgctctggcacaacaagcgcggcgagttgctggcggtggaagtctcggtggagcccatcaccctgaatgaaaccccgtgcctgttgctgaccgcccgcgacgtgagcctgctgaaaaatgcccaggcgcagatccgccacctggcctatcacgacccgctgaccaacctgcccaaccgcgccctgctgatggaccgcctgagccagcagatcgccctgctcaagcggcataacttgcgtggcgcactgctgtttcttgacctcgaccacttcaagcacatcaacgactccctcggtcatccagtgggcgacaccgtgttgaagattgtcaccgcgcgcctggaagccagcgtgcgcatggaagacaccgtggcgcgcctggggggggatgagtttgtggtgctgctcagcggcctggaagggtcacgcatggaagtcagcggccaggtgcaggcgttggctgacaccttgcgtgaattgctctcggagccgatgttcctggacggtcatcgcctgcaggtcacgccaagcatcggcgtggcactgattcccgatcacggctccacgccggcggacttgctcaagcgtgccgatatcgccctgtatcgcgcaaaggattcggggcgcaacaccacgcagatgtttcacaacagcatgcaaaaaaccgccagcgaacgcctgcgcatggagacagacttgcgcctggccttgtcacgtggcgagttcagtgtgcattaccaaccccaggtggacgcgcgcggcaacaagatcgtcggcgccgaggccctggtgcgctggcaacacccgcaactgggcgcgcagtcgccttccgaattcatcaaggtgctggaagacagcggcctgatccttgaggtgggcacctggatcctggatgaagcctgcgcggcctttcaacagctgatccacgaaggcttggtagacccactgaatttcagcctgtgcgtgaacatcagcccccggcagtttcgccagaacgacttcgtggagcgggtggagcgcagcctcaagcaacaccagttgccgttcagcctgttgaaactggaaatcaccgaaggcatcgtgatccagaacctggatgacaccatcagcaaaatgcgccgcctgaaaaagctcggcgtgagctttgcgatggacgacttcggcactggctattcatcgctcacctacctcaagcggctgccagtggatgcgctgaagatcgaccagtcctttgtgcgcgacgcgacccatgaccccaacgacgctgaaatcatccgcgccattgtggccatggcccgcagtttgaatctggaggtgattgccgaaggcgtggagaccccggagcaactggcgttcctgcaaaaactgggctgccatttgttccagggttatttgcatagccgacccttgccgatcgaggggttccggcaactgctgaggtagccctcacaccagtttcaatgcccacattgctctatcggaccaccccgatgacgtcaagccgagcttttggccgtacatgtccaccgagccgtttaatgccagcaccgaatgcgtatcgtcagcgagagtaccaatggcgccgccggccaactcttgcgcactgctctgccgcacatgggcaatcaaccccagcctgcgcaacgcctggcctggcgcttctccgtcattcaacgagtgcatggcatcctcaaaactgcgaccggcacgcatgtcgttgttctccagttgcgcacgcttggcgctcacggcgtacaaaaagttggcatcgtccttgagcgccaggtcagaaccggccaggtttgacccctgctcggccttgcgccgctcttcatggctcagaaacagcttgaagccatcgcgcatgatcacgtcaaaaccacccggtacagcgctgatgtttttgtaaatacccgcaggattctgaccaaatttcatcattgcggccttgatcgccgatatcgtgacgcaattgccctcggcaccttgataaaagccgccccatatatccttcggtttcataccgactggcatctgtgaaacaaccgtgtcattgctgaagggcgaaaccgtttcgggccggggtttgtcgttgaacaggcggtagccgtagcctcggccaacacggcgcctttcggtgtagtcgtgcacgacgccaccgaggacaaacgcactgcctcggctatgcgtctccagcactcccgccaccccatccccgaccatctgatgagccgaaacatattgcgacagcccgtacaagcccatgccccgcaggcaccgcagggtcgtctcaccctgcaaggtatcagccaaggcgccgtcgaaactgtgatagccgcccgtaatctgcttgcgcttgacataggcggcaagcgcgacgttggcgctgtcaacggcgccactgtccgcaccggtgaagcgggaagcgcgccttgtctgttcgagttcatgttgggaaatcaccaccttgaactcgtctttcatggtgatggcgtacccccccgcaaccggcgtgaattgggtaaacatgtctttcgggcttgacccaaaggttgccatcatcatcttgatgaccgccgcatgggtgctggtatcaaaattctcgccaaaatgacgccgagaagcttcaaaaccgacgccctttgcggtcggtttggcaaccgcctgtcccgtagcgtgggtaacgtgcctgtagtccggtgaactccaccagccgacaggaggagcaaagacagcaaaggtcataaaccctccgaaaccaaattgaatgagtgaaaaaacgctgcccccaaccagccctccccaatcgcacctgtgatcggggaggctggatccctcatcaagcttttaagacgagccggctgacatcaagactcgtctgcacctcaggcccttaccccttccaatcgaggattcatgaccctgcggaggacggtgggggttttcacttctacagttggctctgcatcaaccttgtccgaaggttgtggccctggagtggccggcgtctggaccttcggctctgcaccgactgctacctcagccttttgctccccgttcgactcgccattcaccttgggttcagtatccgctatcgcctctgccttcgactgagaaatggtctttacttccgcgtccggctgcgtatccagcgccacgcgcgtcgactgcctcgggataatgtcacggatttttactggttggttctccccccacccctctgaactaatccgcacgttgacaccggcctccacgcgtaccctgaactgtttaccttcctcagctgtaacgctcacttgcgtactgccatctggcataacctgcacctgggcatcaccacccgacgtacccacctgtgcgtcaccgccaactttcccctgaacgctatttccgacagtctccgccgacgaacgattgctaaaacccgtgattttcatctgcgcgccgccactcgcgtcggccttgacattaccgtccttgccggttgtcactgtggtcgatttattattatcgtcagcagtcttcacttgcatggaggtatctgcaccgacgcttacattgccgtccttgcccacagtaactgttgccgttttattgtcgccggtggctttaacttgcacagagccgtcagcaccaatactgactttagcgtccttatccgcagtaactgtcgagatattattatcgctagcagtcttcacttgcgtggagccatctgcattgatactcacactcgcaataccaccggagaaccgttcactgttcttggcaaaaggtaacggcttccctttggaattcaccccgccctccacagacacttcaataccactctccgtcattgcggtatgcggaactactgttgcggcttgagaactgaatgccctgccggacaagaggctgcgcatggccttgaagaccagatcaaacatctcaaataatttttccagcgcatcagagttaacggaaatctcctttgctcccgtcaaaggttgattaacgtctcgggcagcccctttaataccgagatccgtagcgagcgtgctcacgcgctcaacatctttcagaagaccagtagaacgttggcttgccgattggagttccggaacaaaagccttaggagtgccaagcgatacattggacatcttgtaacctcatgattagttatgtgctgcctcgaagcatttagaaactcggacagcaattaatataaaactggaaacaatcatcatctcgcagtccctattttcgtggaccaaaacacgatcaagttccaataatccaacttcacataaggcaaacaaaattgaaaatcagattttagcctatggctgtttgaggaaacgctctacacccactgcgccagcgaacgccgcatggacaaacaaggtaacaaccaagcccaaatcaaaaacaatgaaaccattaacccccaacaaaacccaacacttatgctaattgcgcacaagcacgtatcagaaaacaattaacttgcgcttcccccggaaaactaaagcagcaatcaaataactgcctacattcacgctcccacaatcaacatcagtaaacatgaatgcccttgcccttcaggcccgggaacattcacttaaacagcgcacaaaaaagggcgccaagggcgcccactcatcgatgcttttgcaaacttattaaatatgaacgctatttttcagcgccgtcactcactgcgagtctaccggcaccataccgagcaaacgactcacttgggccaactcggtttcccggcgcatggccgtaaacagctccaccgcttccggatagttgcgcgtcagcatcgccagccattgtttcaaacgacctggtgcctgacgctcggtcagttgcgccaccgactgagtccagaagtcctggagcatgggctgcatctgcgcccaggtcatttcaaccacctcctcacccgcccgcgccgcagcgatctgccgcgccaggtccgggcgcgccaccaggccacggcccagcatgatgtcttcggcaccgctgatttcgcggcaacgcttccagtcttcgacgctccagatatcgccattggcgaacaccggcaccttgaccacatcctgcacccgcgggatccattcccagtgcgcgggcggcttgtagccatccgtcttggtacgcgcatgcaccacgatatgcgcggcaccaccctcggccaacgcggtggcacagaccagggcgccgtccgggctgtcgaaacccaggcgcatcttggccgtcaccgggatgtgcgccggcacagcacggcgtacgtgctcgacgatctggttgagcaactccggctccttgagcagcaccgcaccgccacgggacttgttgacggtcttggccgggcagccgaagttgaggtcgatgacctgcgaaccgagctcacaggccagggcagcgttttccgccaggcacaccgggtcggagccgagcaactgcacgcgcagcggcacaccggcagcggtgtgggcaccgtgcagcagttccggggccagtttgtggaaatacgcgggggtgagcaggcggtcgttgacgcggatgaactcggtcacacaccagtcgataccgccgacacgggtcagcacgtcccgcaggatgttgtcgaccaacccctccatgggcgccaaagcaatttgcatggaaaacactcaacaaaaatcgtggcgcagtttactgggtttcccacagcaaccgttaaccccctgtcagggcggggccataaccgtcaaggaattcagccggcatgcgcttgggcttgccagtggacagctcaatgcagacgaaggtggtttgtgcgcgcaacagggtcgcgccgtcacgggggcggaccagttggaagcgccgggtcattttcaggcgctggtcccagtcgacgatccaggtggccagttgcagctcatcgccttcatagccagcggccaggtaatcgatctcatggcgcaccaccgccatggcgcgatccagccggcgatattcgctcaggtccaggcccaggcgctgggagtggcgccaggcgcagcgctccagccaggacacgtataccgcgttattggcgtgccccaggccgtcgatatcttcaggagcaacctgcagatcgatgataaacggcgttgccaaatcccagcccatgccttgctcccagtcgattaatgtcggcggggagagtgtatcaggcgctttgccgctcctgtagacgacggccggccaacaacgccagcacagcgtcgatcacgcgcggatcggccaggactttctggtgaccaccctgctccaggcgcaacaggcgactgtcgaaccaggcttcgtgtatggcctgagaggctttgaccgggacgaaggtgtcgtcttcggcatggacgatcaggcccgggatattcatctgatagtgggccacgtccaaatgcttgagcggcatgccgaaggtcagctcgacctcctggataaacgccgaacgtgcccgcgccggcaagccgaccatcttggtaaagccgcgcaatacatccagaaaccgtgagggtgcagcaatgctcaccaacgcctccgtgcgcagccccaactgcaccgccaacatcgcactggcaccgcccatggagtggccgatgacggcgtgcagcggcggcaactcggcggcagcttcaagcatggcacgggcaaacagcagcacatgggcttcacgccccggcgaacggccgtgggccggaccgtcgagggcaatcaccgagtagccgttgtcgaccaatgcgctgatcaggctggcaaactgggtaggtcggccttcccagccgtgcatcaacaacacggcaggcccctgaccccagcgcaacgcggacaagccgaaacgcagggtgatgcgctccgattgcgccagcagcggcagttcccagtcacgtggcggcaggtcgcggggcgtcatgaaggcgcgacgcatgcgattggcgaccgtttgtggtgccaggtgccccagcgtgccgttgaaacgacgaatccaggtaagcgtgcccatcatgcagccctcttctagcgcacagccgacttggcggcgcgcagcacacggtcagacaactcgcccggtcccaaggcgcgggccagggccaggccaccgatcatcagcgccatgtcagccagggctttgtcggtgtcctcggggctggcagccaactgggcggccatcagttcacagtgctcattcagtgcctggcggaactcatccggcaggcggctcatttcgccgaccgtggcgggaatcgggcaggcctgggcggtggagtcgcggtgcttgcgcgacaggtagaacgccgccaccaggcttctgcgctcctctccggtcagttgtgagtccatgtcatcaatcgacgcacgacgcttggccagcaactgagtgaaggcctccagcatcaatgcatccttgctttcgaagtgcgcatagaaaccaccgaccgtcagccccgccgcacccatcacttcacccacactcggttcggccgggccacgctggatcagcgcggcgctggcggcctgcaaaatgcgttcgcgggtttgcgcttttttatcgctcatcattgcctccgatgttcatgggttgaatattattaccataataatatttggcaagcgacaggcatgaccgttggtcagaagaaaaagcaaggagggcaaaagaattggccaaacgccagacaaacaaaagggccattcaataattgaatgacccttaaaaatcccgcagagcgggtaatcgtggcgtcccctaggggactcgaacccctgttaccgccgtgaaagggcggtgtcctaggccactagacgaaggggacacaaaccttctgtacactgatcaggctgaggctgatcgatccaaggacggtgtggccggaaccttggaactgtaaattggtggagctaaacgggatcgaaccgttgacctcttgcatgccatgcaagcgctctcccagctgagctatagccccggatttttcgtctcgcgacgtagcaggcctttcgaactgcttggtgaaactggcgtcccctaggggactcgaacccctgttaccgccgtgaaagggcggtgtcctaggccactagacgaaggggacaaaaccttctgtacagctgatcagcgctgagagctgatcgattcaaggacggtgtggccagaccttgaacctgtaaattggtggagctaaacgggatcgaaccgttgacctcttgcatgccatgcaagcgctctcccagctgagctatagcccctcatcggtgaggacggggcgaatcttaatggcggtttggaagtgtgtcaaatttattttcaacaatttccaaaattttttgccgggataacaatcacttaccggcgaaaccccggaaaaccggggtttcgtcgtttcaaccgtgtgctcaggcgatggcgcccagcagcttttcccactctttgttttctttcttcgacacaccaccaagcaaatcaagggcttggcgcagacggaaacgcgtcaggtccgggcccaggatttccatcgcatcaagcaccgacaccgaactcgcctgcccggtgatcgcggcaaacatcagcggcatggcatcacgcaatttcaattccagggattccaccaccgcctggatcgtcgcagtgatcgcatccttctcccactggcgcaggctttcgagcttccacaggatcaactgcatcagttggcgaacctggtcgcccgagagtttcttggattcaaacagcttggcatccgggctcacgcccccagcaaagaagaagctggccaacggcgcgacctggctgaacgtctccaccctgccctgcaccagcggcgcgatcttcatcatgtactcagggttcaacgcccactgctgcacacggctggcgaactcttccaccggcagatcacgcagccactggccgttgagccacgacagcttctcgatgtcgaagatcggcccgcccagcgacacacgcgacaggtcaaagttgtcgaccatttcttgcagcgaaaacttctcgcgctcatccggcatcgaccagcccatgcggcccaggtagttgagcatcgcctcaggcatgaaacccatgcgttcgtagaaggtcaccgaagtcggattcttgcgcttggacagcttgctcttgtccgggttacgcagcagcggcatgtagcacagctgcggttgttcccagccgaagtactcgtagagcaggatcagcttcggcgccgacggcagccattcttcgccgcgcaatacgtgggtgatgcccatcagatggtcatcgaccacgttggccaggaagtacgtcggcaagccgtcggtcttcatcagcacctgcatgtccatgcggtcccacgggatctcgacgtcaccgcgcagcatgtccggcaccacgcacacgccttcgctcggcactttcatgcggataacgtgaggctcaccggcagccaggcgccgggccacctcttctttcgacagcagcagcgcgcggccatcgtagcgtggggtttcgccgcgagcctgttgctcggcacgcatctggtccagttcttcggcggtgcagaagcacgggaacgcatggcccatgtcgaccagctgctgggtgtactgcttgtagatgtcgctgcgctcgctctggcgatacgggccgtgcgggccgccgacgtccggaccttccgcccacgtaatgcccagccagcgcaaggcatcgaaaatctgctgttccgactcgcgggtggaacgcaattggtcggtgtcttcgatccgcaggatgaattcaccgccgtgctgcttggcaaagcagtagttgaacaaggcgatgtaagcagtgccgacgtggggatccccagtaggcgatggcgcgatgcgcgtgcggacggtggtcatggcaggtctcgaatgggcgataaaactgaaaattgaaacaaggggcgaatggtaacagcctgggggatttctggaaaaccgcggcgcggctatcgggggcaagccccctcccacatttgaccgaggtccagtgtgggagggggcttgcccccgatgaaaccaccgcaaatcagacggccagcaagcgctcccgcaacttgccgatctcatcccgcgtctgcgccgccgcctcgaactccaggtcccgcgccagctggtacatcttctcttccagttgccggatgcgcttggtgatctcgctcggcgagcgcaattcgttctcgtacttggcgctttcctcggcagccttggccatgcccttgcgcttcttgctgcgcgagcccggcacggtggcgccttccatgatgtcggcgacgtccttgaacacgcccttgggcgtgatgccattttccaggttgaacgcgatctgcttgtcgcgacggcgctgggtctcgccaatcgcccgctccatggaaccggtgatgcggtcggcgtacaggatcgcccggccattgaggttacgcgcggcacggccgatggtctggatcagcgagcgctcggagcgcaaaaagccttctttatcggcatcgaggatcgccaccagcgacacctccggcatgtccaaaccttcacgcagcaggttgatccccaccagcacatcgaaggtgcccaggcgcaggtcgcggatgatctccacgcgctccacggtgtcgatgtccgagtgcaggtagcgcacccgcacgccgtggtcggccaggtagtcggtcaagtcttcggacatgcgcttggtcagcgtggtgaccagcacccgctcttccagggccacgcgcttgttgatttccgagagcaagtcgtcgacctgggtcaacgccgggcggatttcgatttccgggtcgaccaggccggtcgggcgcaccagttgctcgatcacacggcccgcatgctcggcctcgtagttacccggcgtggcggacacaaaaatagtctgcgggctgatggcttcccactcatcaaagcgcatcggccggttatccagcgccgacggcaggcggaaaccgtactccaccaacgtctccttacgcgaccggtcccccttatacatcgcgccgacctgcggcacgctgacgtgggattcgtcgatcaccagcagcgcatccggcggcaggtaatcgtagagggtcggcggcggcgccccggattcgcggcccgacaggtagcgcgagtagttttcgataccgttgcagtagcccagctccaggatcatctccaggtcaaagcgggtgcgctgttccaaacgctgggcttcgaccagtttgttgttggaacgcaggtactccaggcgctcggccagctcgaccttgatgccctcgatggcgcccatcagggtttcacgcggggtcacgtagtggcttttcggatagaaggtgaagcgcggcagcttgcggatcacctcgccggtcaacgggtcgaaggccgacaggctctcgacttcatcatcgaacagctcgatgcggatcgcttccaggtcggattcggccgggtagatgtcgatcacgtcgccccgcacccggaaggtcgcgcgggcaaagtccatgtcgttgcgggtgtattgcaggctggccaggcggcgcagcagttcgcgctggtcgagtttgtcgccgcgatcgacgtgcagcaccatcttcaaataggtttccgggctgcccaggccgtagatgcacgacaccgtggtgacgatgatcgcgtccttgcgctccagcagcgccttggtcgccgacagccgcatctgctcgatgtggtcgttgatcgacgcatccttctcgataaaggtgtcggaggacggcacataagcttcaggctggtagtagtcgtagtaggaaacgaagtactccaccgcgttgttcggaaagaacgccttgaactcgccatagagctgcgcggccagggtcttgttcggcgccagcaccagggtaggacgattgatttgcgcgatcacgttggcgatgctgaaggtcttgcccgaaccggtcaccccgagcagcgtctggtgcgccaggccggcttcgatgccttcgaccatctggcgaatggcttcgggctgatcgccagcgggttcaaaacgggtgacgagttggaaatccgacataacgtacctcgtgtagtcaccccagactcgaaaccgccagggacgaaatagctcagcaacccgcgaatgatcatcgcaggttgcaggaaaaaaccatgatagctgtagaagtggtgccgaatgtgacgggtttcaagaccatcgtcctacgtgccgtgccggatcaatgttgcaataagactaacggtcagcaaataaaccgaaaaacttggccgaaaagccatttcggctgtcgccctcggcagtgatgggctctatactagctccccgtttgtgcaccgctctagtgcattcggctggagcgcgacacgtccctcctaccccccatagagctgccgcaaaaatgagcctgttctccgctgtcgaaatggcaccacgcgatcctatcctgggcctcaacgaagcattcaacgccgatacacgaaccaccaaggtcaaccttggcgtgggcgtttactgcaacgaggaggggaagattccactcttgcgtgccgttgccgaagcggaagccattcgcgtggcacaacacgccgcccgtggctacctgccgatcgatggcatcgcagcctacgacaaggctgtgcaaaccctgctgttcggcgctgaatcgccactgctgaacgctggccgcgtcaccaccgtacaagcggtcggcggcaccggcgcactgaaaatcggcgctgacttcctcaagcaactgctgcccaacgctgtcgtcgccatcagcgacccgagctgggaaaaccaccgcgccctgttcgaaaccgccggtttcccggtgcagaactaccgctactatgacgccgccacccacgacgtgaaccgtgccggcctgctcgaagacctcaacgccctgccgccacagtccatcgtggtgctgcacgcctgctgccacaacccgaccggcgtcgacctgagcccggccgactggcagaacgtgctggacgtggtcaaggccaagaacctggtgccgttcctcgacatggcctaccagggctttggcgacggcatccacgaagacgcagcagcggtgcgcctgttcgctgaatcgggcctgaccttctttgtgtccagctcgttctccaagtcgttctccctgtatggcgaacgggtgggcgcactgtccatcgtcggcgagtccaaggaagaaagcgcgcgcatcctgtcccaggtcaagcgtgtgatccgcaccaactactccaacccgcccacccacggcgcggcgattgttgccgcagtgctgaacagccctgagctgcgcgcccagtgggaagccgaactggccgaaatgcgcctgcgcatccgtggcatgcgcgagcagatggtcgcaaccctggccaaggctgctccgggccacgacttcagcttcgtcggccgccagcgcgggatgttctcctactctggcctgaccgttgagcaagtcacccgcttgcgcagcgaattcggcatctacgcactggataccgggcgtatctgtgtggcggcgttgaaccagtcgaacattgatgcagtcacaaaggcaatcgttcaggtgctgtaaacctgcagccgttgcaccagaaggggaagccgatggcttcccctttttcgtctccagcccctagactgaacctcgaccgcccctttgctgtgagtaccttatgagaaacgatgacctggacctgcgtgccgaccgcgacgaactggaccacttcaccccgcgcgcaccgcaagtaaagcgccagaagagcctggtgctgcaagtggcgctcggtgtgttcctcggtggcctggcgctgtggctggtgcaattgggcgcgactgcaatcatggcaaaactggccatgggcaccctgcaattcggcggctgataccaatcacaatctaggaagcaaccagatcgcgttcctccaacagctttacaaagctgttgaggctctgcgacaccgtcccgcggcgccagatcagccaggtattcaaaatccggaagttatccgtcagcggccacacactcaccgctgccgaccccggcatgctctccagcatgctacgcggcatcagcgccagcccggcgccggcgctgacgcaggcgagcatgccgtggtaggactcgatctcgaaaatcttgcccggcaccgcgccgtcctgtgagaaccagcgctcaaaatggtgccgatacgagcagttggagcggaaggtgtagatgttctcgccattcacatcctgaccacgcttgatcggcgcatgatgcagcggcgcaatcaccaccatctcttcttcaaacaccaccaccccctccagcgtggcatgcagcaccggcccatcgacaaacgccgccgccagccgtcccgataacaccccttcgatcatcgtgcccgacggtccggtgctcaggtccagctcgaccttggtgtgcttctggttgtacgccgcgagcaacgccgggatacgcaccgccgccgtgctttccagcgaaccgagggcaaacgcgccctggggttcctcccccgccacggtcgcgcgggcttcctgcaccaggtcgaggatgcgccgcgcatagccgaggaaattccagcccgccggcgacaggcgcaagcggcttttctcgcggataaacaattccacgcccaggtcctgctccagctgcttgatacgcgtggtcaggttcgacggcacgcggtgaatcaactgcgcggcggcgctgatgctgccttgctcggcaacggccttgaagatttccagctgcaccaggtccaagtcattctccaatcgtgaatgtattgcttaatattattcagtttccagaaaagagctagccccgtaggctgaacccaatctcatcattcagcaggacggtgccatgaacgcgactacccacgccctctcgatcaacccggccaccggcgaaacggtcggcagctacccgtatgaaaccgcgcagcaactggacgccgccctcgagcgcgccaccctcgccttccgcacctggcgccgccagccggtcagccagcgcgccgagttgctgctgagcctggccagcgctctgcgcgaacaagccgaagacatggcgcagatgatcaccctggaaatgggcaaacccatcgcccaggcccgtgccgaaatcgaaaagtgcgcgcagctcagcgagtggtacgccgcccacggcccggccatgctcgccccggaaccgaccctggtggacaacggcagcgcccagatcgaataccgcccgctgggcccgatcttcgccgtgatgccgtggaacttcccggtgtggcaagtcctgcgtggcgccgtaccgaccatgctggccggcaacacctacgtgctcaaacacgcgccgaatgtgatgggcagcgcttacctgatccaacaggcgttccgcaaagccggtttcgacgaaggcctgtttgaagtggccaacgtgaccaacgacggtgtgtccaaggccatcgccgacccacgcatcgccgccgtcaccctcaccggcagcgtgcgcgccggtatcgccatcggctcccaggccggcgccgcgttgaaaaaatgcgtgctggaactgggcggttccgacccgttcatcgtgctcaacgacgccgacctcgacgccgctgtgcaagccgccctgatcggccgcttccagaacagcggccaggtctgcgccgctgccaagcgcctgatcatcgaggacggcgtggtggaagccttcaccgccaaattcctcgaagccagccgcgccatggtcatgggcgacccgacttcagccgccacctacatcggcccgatggcccgcttcgacctgcgcgacgagttgcacggccaggtccaggccaccctggaagaaggtgcgaccctgctgctgggcggccataaagtacccggcgccggcaattactatgcgccgaccgtactggccaacgtcaccgaccagatgacctcgttcaaacaggaactgttcggccccgtagcctcgatcatcaccgcccgcgacgccgaccatgcggtggccctggcgaatgacagcgagttcggccttaccgcgagcatcttcaccagcgacccggcgaaggcgcgggacatcgccaatcagctggaaaccggcggcatcttcgtcaacgccttcagtgtttcagaccctcgggtggcgtttggtgggatcaagaagagtggcttcgggcgtgagctgtcgcacttcggcgtacgggagttctgcaatgcccagaccgtgtggctggatcgcaaataaatcagagcagcaccagccccgggccaagcccgctcaccacaggaatctggtcgcctgaaagtgtttatgcacgaatatgccgccgcacacactgcaccaacccctccagcgcctgcgacttcactggcgcgagcacacagaccgtgtgttcgcgctggtcctccttcaccgtcagggtgtaatgcacctggcccgggttaccgggcgcgggttcactgctttgcggcagctgaaagaagtcgcacgcctcgaccaactgccgcaactcctgctggtcctgctcgggcaggctgtccaactcaactgtacgcggcttggccaggcccggaaaaaaagcaggcccgccgttttccttcagcgaaatttgcatggctgttcctcacgtcagaccgaaataccgaccgccttccagccctccttgaccgccttctgctcatccttgttcgcaccgtagagtcgaccggcaacatcgtaggtaatgcgcgcaaagcgcaaaaaccctgagttcggtcgcaaccgcgcatcgcgcaatgcgtcgtaccagatgcgcccggcacgctcccaggcaaacccgccgatgtttgtcgccacctggtagaacgcatggttgggaatgccggaattgatatgcaccccgccattgtcctcgtaggtctgcacaaaatcatccatgtgcccgggctgagggtccttgcccagcagcttgtcgttaaacgcggtgccaggggctttcatcgagcgcagcgcggtgcctttgatctttttggtaaacagccctttgccgatcagccaatcggcgtcctcggccttttgcttcaacgcatactgcttgatcaacgaaccgaacacgtccgacagcgactcgttcaacgccccggactggttgaaatacatcagcttggcctcatcctcggtgacaccgtgggccagttcatggccaatcacgtcgagggctaccgtaaagcggttgaacagctcgccgtccccatcaccgaacaccatctgggtcgagttccagaacgcattgttgtagttctggccaaagtgcacggtagcgtccagggccatgccggcatcgtcgatggagttgcgatcgaacacctggtcgaaaaaatcgaaagtggcgcccaagccatcataggcctcgtccaccgccgcgtcgccactgatgggctggccttcgccacggatcagtttgcccggcaggctgtcggtgccctcggcgctgtagatcgaacgccgtttgtcggcgcccatcgccagcgccaggtgcgccggccccttggcaggcaccgcgaccatgcgcagtgagcggaacgtgctgtccttggcgcgagtacgcagcgcgacatcccgttgcgctttgtcaccgttacgcgcgatctggtcgagcatatacggcggaatcaggcagaaaatcgggtttcggtaatggcgatcacacattggctggctccttgttggcgtgtgctgaacgtccgggtgaccgtttgaggatagcccccaggggttggtgcgcatgatcaattgtcattaacctatgttgcagtcgtgtttatccaaggaggactgaccgatgcccgcacgtaaaaccaaaatcgacctcgcctaccgcccccggctcgccgacatgcgcccgttgatcgcgccgagccccacgctgctggaggccagggcagcgacaccccgcgtcaccccggccaaagacttgaaggaccgaagtggctacgcagaagactttctcggcagcttcggggtgccctggcccacgctggaggaggcgttgacgagtgatgcccagaagcgcctggactacacacacttctccatcacgatgtcacgtgccaagcgcctcgcgctgtatgtgggcgtgaacatcgatggcgggcaacatgtggacatcatccgcagcaacgacacctgggcttacgatggccgcctgccggtcgacgcccaagtcggcgaagcgctgtatgccagcaacggcctcgatcgcggccacctggtgcgccgccaggaccccaattggggtgatgtggcgcaaaccgccaacctcgacaccttccacttcaccaactgctcaccgcagatgagcgggttcaaccagaagacctggctggaactcgaagactacatcctcgacaacacccagcgctggaaagcccgggccacggtgttcagcggcccggtgttcgccgacgacgaccgcgtgtaccggggcgtgcagatccccaaggcgttctggaaggtggtcgcctacctcagcgatgacggcaaaccttcggccagcgcctacatgatcgatcagagccgcgaactgggccagttggagctggtgttcggccagctgcgcacctaccagcgcagtgtgatccagatcgagcgcctgaccggcatccgcttcggcaacctggccgactacgacggcttcagcaacgaagaacgcgccaccggcacgcggattgaagcgctgatccaggggcctgaagacattcgtctttgatcaacgcttcacaggttgatccgcgttgacaactgacactcaccacgacgcgaggcgagccgctcttgatctggctgatacgattccatcaagggtgaacactgcatccgtggcgagcgccgtacccaggcgagtgaacgggctagccatcattgcgcgttgatgtaatgaaactgtgcctgcgttttctcgactgccgcacgcacggcgtctttctgcgcctcggtgcccgagtagtaaatctgcatacccttcaagttttgcccttcgactgctttgccgatcaccgcaacatcaaccggcgtgctggcaccgataatcaaaaagaacacatcgcccaagcgtttggcatcgagcagctctgccctgaggtgcgcggcattttgctcacccgccatggaaatcgccagggtatcgccgaacataccgcttttggggatgctcatcgtatgcagccggagcttgtccgaccccgccggcatcgacttgacataggcggaggcggcctcatcaagaatctgctgttcagatttaccctgggtggcacaaccgacgagagcggcggcgagggcgagcgcgacgaataatttcactgtctattccttgtgataaagcgatccattggctgcgcatcataggagccccaccttcaaagagccaccgttggtttcacggcctcccgctcgaccgcgtgatcgactaccataccgcgccggttcccaaacgggactaatagggaatccgaggcacggtacacccgcgccaatcggaactgcccccgcaactgtaggtgctgagcctgctcctcgatgccactggacctcgtccgggaaggctggagcgtggcgacgacgcatcagtcaggagacctgccggcccaagctcaatcactaaccggcggggtgtccgggaaggacattcttgcctgtcgcgcccccggcgcccgagagtggatttccgaatggcacgtacgcatcactcggagatcgccccatgctgccacgcgttatcgccctgcttacaggtgttggcttctgtgccctggcccacgccgcgcccactcactacccgctgaccgtggaaaactgcggcagcccgatcaccttcccgcaagcccccgcccgcagcgtgactatcggccaggccgccaccgagatgctctacgccctgggcgtcggcgataaagtggtcggcacctcgctgtggttcaacagcgtgttgccgcagtacaaggcgcagaacgacaccatcgagcgcctggccaacaacgagccgagcttcgaagccgtgatcgccaagcgcccgcaactggtggccgccgagctggaatgggtggtggggccgcaaggcgtggtcggcacccgcgagcagttccatgaactgaagattcccacctacctgctaccctccgactgcgaaggcaaggacaacctggtgggcgccgacggcacgcggctggagccgtttcgcatcgagaccatttataaaagcatcagccaactggcgcagatcttcgacgtacaggatcgcggccagcagttgaacgatgaactcaaggcgcgcctggccaagtccgtcgccaccgtgcagggcaaaggcctcaagcaggccagtgcgctggtgtggttttccagtgccgagatggccagcgacccgtacgtggccggccacaaaggcatccccgaattcatgctgcaaaccctcggcctgtctaacgtggtgcagtccgatgaagagtggcctgccgtcggttgggaaaccatcgccaaggccaacccgaccttcctcgtcatcgcccgcatggaccgccgccgctacccggccgacgaccatgaaaagaaactggccttcctgcgcagcgacccggtcacgcgcaacatggacgcggtgaaaaacaaccgcatcatcatcctcgacgccttggcgttgcaggctagcatccgcatgttcgacggccttgaacaactggccacggccatcgacggctacgacctgccaaaatgatgcgcaccctgctcgccctggccctgctcctgattgccgtgctcgccggcgtggccatcggcgaaaccgccatctcgccgcaggtggtgctccaggtactcgccaacaaactgtggggcgccggctacgtgctcgaccccatcgatgaaggcgtggtgtggaactaccgcctcacccgcgccctggtcgctgcggcctgcggtgccgggctggcgacctgcggggtgatcctgcaatcgctgttgcgcaacccgctggccgatccctacctgctgggcatcagcgccggcgcttcgaccggtgcggtgctggtggcgttgatgggggtgggcggcggcttggtgtcgttgtcggcgggcgcatttgtcggcgcgatggcggcgtttgccctggtaatcctgttggcacgggccagcggttcggccagtggcaccgggcagatcatcctcgccggcattgccggctcgcagctgttcaatgcgctcaccgcgttcctgatcaccaagtcggccagttccgaacaggcccgcggcattatgttctggctgctcggcaacctcagcggcgtgcgctggccctcggtgtggctggcggtgccggtggccgtcgtcggcttggctgtgtgcctgtggcaccggcgcgcgctggatgcgtttacctttggcagcgactcggcggcgtccctcggcatcccggtgcgtcgcgtgcagtttgtgctggtgggctgcgcggcgctggtgacggcggtgatggtgtcgattgtcggctctatcggctttgtcgggctggtgattccccacgccgtgcgcctgttgcttggcaccgggcactcacgcctgctgccggcgagtgccttgggtggtgcgttgttcctgattgcggcggatgtgctatcgcgcacgctgatcaagggccaggtgattccggtcggtgtggtcaccgcgctggtcggtgcgccggtgtttgcgctgatcctgatcggccggaggaatgcgcgatgagcgtattgagctgccgcgggctgggcttcaaggtgcgcgaggccgagttgctgcgggatgttcatctggacgtgcagttgggtgaaaccctcgggattgtcggaccgaacggctcaggtaaatccaccttgctcaagctgctcgccggcttgcgtgcacccgcatccggcgaagtgctgctgggcggccagcgcctgggcacgctgtcccgccgcgccatcgcccagcaactggcggtggtggagcaacaggctgacaccgacgacgccatccgcgtgttcgacgccgtggccctgggccgtacgccatggttgtcggcgctgagcccgtggtccgttgaggacgacgccatcgtgaagcaagccctgcaggacgtcgacgccacccacctgagccaccgcgcctggcgcagcctctcgggcggtgaacgccagcgcgtgcacatcgcccgcgcattggcgcaacggccgcagattctgttgctggatgagccgaccaatcacctggatatccagcatcagctggcgatcttgaagggtgtgcaggcgctgcccgtgaccaccttgattgcgttgcatgaccttaaccaggcgctgacctgtgaccgcctggcagtgttggatcgcgggcggttggtggccctgggcaaaccgctggaagtactgacgccacaacggttgcaggagacgttcggggtgcaggcgcattacctgacggacccgcttgatggggcgaagatcctgcggctgcgccccgcttaatactggaatagcggtttatcgtggcgagcgggcttgccccgcgttgggctgcgaagcagcccnnnnnnnnnnnnnnnnnnnnnnnnnnnnnnnnnnnnnnnnnnnnnnnnngggctgcttcgcagcccaacgcggggcaagcccgctcgccacaacaagcccacttgccacaaaagcccgctcgccacaggcctacaggaactgctgcatatgcgccgtccgccagaccgggtctgcttccacatctacgacctcgaagccctgccgaacccagaactcaatcgcccccggcaaaaacgggtgggtatgcaagtacatcacctcaaccccatccgcctgcgccatcgcttccaacgcacggtacaactgccccgccaagccaaaacgacgaaactccggcgctacgaacaagcgcaccacctccaccgtcttgcggccttggtaatccagttgagggaaacgcccgtcatagggcagatacccgatggccgcaacaatttcgccaccgttgcgagcgatcaaaaagcggccttcgccctgaagataaatcgacgcaaagcgcgcgaggtcatccggcatgccggcgtcgtgaagcttggggaacagctccgcacgcgcctgcagcacaaagtccagcacctgtggcacatcccccattgcaactggccggatgatcactggcgcaactcacacaccgcattgcccttcatgcccgacgcatgcacgctcacatggcgcaccgtaaaaccgggcttcaccaccagcttcttctcttcccaggtgccgccgttttcaacctggtaaccgatggcgccatcggcttgccaggtcaggcgcagggtgtacacgccgttatgatcgagtgtttgatgaatcggcgtatcgatgatcggcttggccttattgaacgtacgcaggttgaaaatccgctgatccgtaccggctggcgaatagctggagagaaacaacgtatcgtcttcggccgcatcctcggcggccgccaggatcaccgacggcacccacttctcgccacggtcctgggtgtcggtgacgaccttgcaggtcaactggcccttgccggtgacgttctggcgccagcccgtttcgtaaaaaccgtagggcacatcgaagcgcagggtcttctcggtgacttgctcgcagccggccaacaggtagagcgctgataaagcgatgactccttttagaaacttcacgtgctgtccttggcttgaataggtggggccgagagattacccgcgcagtcagataaagtggatagatttagcgggctgccgtgtcgtgatatacctgcgcccgtcattgatttcaaacccgacgggttaaaggagatgagcagaaaatgactgaactacccatggctgacgcgcgccagaatgataaaagccgcaaggtcatccagaccgctatcaaagaacgaaacctggcaggcgcggcaaacaacaccaagtggaacgaactgattacacacatgcgccagcgctcggggtgggtaccgtcttatcgctcaaaatacatcacaggccatatctcgggatgggatgtggaatggttttaccacctacctttcccttttgcgtatgtcgaatggctcgacatcggcttgtggcaagaagcgccttcgttaggcgtattactgccacgaacgtatattgaccataccgaggaaatctctcaggttatctcgcagataggcttcgaatttgaagtgaaagccgacgtactgagaatttggggataccttccaaaatccttcgatgactttccgccggcataacgtacagcggcggatcctgcggctacgcccgaactaacgccttgccactgctggccctgctcagccaccgtcactgtagtgagcgggcttgccccgcgctgggtggcgaagccgccccaaacccaggcgcctcggtgtgcctggggtcccgttgcgaacctggcgcggggcaagcccgctcactacaagttacagtcggcatggcggtttgaatgatcatctccctagtagggcactgatccactggtggctataagcaagcacgcgcccccccatcaccaccggaaaatgaataaacccatgcgccgcctccggcaacagatgcgcctcagcccccggccaccgctcagcgatcaacagcgtgtcatccttcaacgggtccaacgcccccacaaacatcaacgccggtggcaagccttcgaagtcgccatacaacggcgataacggcggctgccgacgctcatcatcgctcaggcccggcgtcagcatgcgcaacgcctcgaccatgcctggcccgtccagcaacaaggtgtccggccccgccgcacgtacgctcggggtgccggtcaagtcgtacacgccgtaatacaacaccgccccgcacacgcgctggagcagttgcggccattgcttcaacgccagcaacgtcgccgccgccaaatgcccaccggccgattcgccgaccacgaacaccggcaggccggcaaattcatcggccgtgagcaaccaacgcgccgccgccaggcaatcgtccatcagcccttcgaccggcgtgtcgaccgccaaccgataatccaccgacaccaccgccacctcgcaggcgttgaccatgcccaggttgaggtcgtcatccatctgcgcattgccgattacccaaccgccaccgtggatatccagcaccacacccttgggcttgccgctcggccgcaggatgcgcacgggtacggagtcaaccaccttgcattcagcagccggcgctttcttgagcatttggctggtgcgcaacagcgcctggatcaggcgcggtgtgacgcgattacggatcttgaagcgcggcatccaggcaagcttctggttgaagcgacgcatctcggccagttccggctcactggcgggccagggtgtataggccatcaacggttattccgcaggatcgagaagttcagcgccgccgccacgcacagccaggcaaggtaggggaacaggatcaagccggtgatcaaatccagttgcactgccagtaccaccatggtcgccacggtcaaccacagcaccgcaataatcaccatcccggccaggatgcgatgggcgccgaagaacaccggcgtccacaaggtgttcaaggcgatctgcgcggcccacaaggccagcaccatttggctgcccgggatgaggctgaggcgataaccggcccaggccagcaacaggtaaataatcgtccacgccaccgggaacaaccagttgggtggggtgaagctgggtttgaccagggattcgtaccaggctcccggcttgaagatgatgccggtactggcagcggcggcgcaggcgagcaggaagatgaagaaggtcatgggcggtccttggctgtcgtcagcggttgtgaggggaaggcgttgtccgtgctttatcaatgactcaaacgctcgcgcaaaaattcaatcctgcgtggcaaatcgcatacaacagcgctcctacttcatgtcatcaaaattcgctaaggtgcttcgacaccctaacctgtttgctcaccagcgagatcgcctgccttgacccatgcctccaccccaccctggaaggtgttcctgatcttcctgcgcctgggcctcacctgcttcggcggcccgattgcacacttgggttattttcgcgaagagttcgtggcacgccgccgctggttgagcgagcgcagttacgcggagctggtcgcactgtgccaattcctccccggaccggccagcagccaggtgggcattgcgctcggtttgtcacgggcgggttacggcggcgcattggctgcctgggccgggttcaccttaccgtcggccctcatcctgatcctgttcgccctgggcattgcccaccacggctcggtgatccctgcgggggcgttgcatggcctcaaggtggttgcggtggccgtagtggcacaggcggtgtggggcatggcgcgcaacctgtgccgaggcgtcgcccacgtcatgctgatgctgatagcggccggtgtggccctgctggaaccctccgcctgggcccaggtcagtgtgatcgccgccgcaggcctggccggcgtgatgttgttcaaacccgagtcgagtgccggacatgacgcgctgccgatccccctcagccgccgagcgggggcgctgtggctgggcgctttttttggggtattggtgggcttgccgatcctggccgactggctgcccaacaccaccctggcgctgctggatgccttctaccgcaccggttcgctggtattcggtggcggccacgtggtgttgcccctgctgcaggccgaggtggtgccaacgcactgggtgagcaacgacgtgttccttgccggttacggtgccacccaagccgtgcccgggccgctctttacctttgccgccttcctcggtgcctcgatgaaccagccacccaccggctggctgggcggcgtggtcgccctgctggcgatcttcgccccgtcgtttctgctgatctttggcgccttgcccttctgggccagcctgcgccgcagcccacgcacccaggccgcactggtcggagtgaacgcagcggtggtaggcctgctgctggcggcgctgtatcagccggtatggaccagcgcgatagtgaccgggtacgaccttggcctggcgctgctcgcattcatcgccctgctagtctggaagctaccgccgtggctggtggtggctggcagtgcagcgctgggatgcctattgggataaccccggctccacaattcgcagccatggccagcgcgcctgataactgcgggccttctgcacaaacaacgccggctccggatgcagcgggttgatgcgcaacacgccctgctccacatcctccaacccataaggcgcatacacctcgcccgtggcaatctccaggccgatgcatgtgcccgccaccaggtaacggtcaatcccctgcctggccgtgtgcaactgcgggtaaggccggccaaagcgctcgccgtaccacagatgcacccgcgcctggttcttcacctcgacattgacgcccaggtcttggaacaagcgctcggccgcacggatgactgcgtcttcagcctcgtaggacaggtcggtatcgaagtagaaaacgtcgtagtcctttacgccctgggccgccggcaaattcgagtgatgattccacaccgcctggaacaggcagcccgccgtgaggaagcactggtccacgcccaggtcgggcaggcgcgcggtgatttcggcgttgatggggttggccatggccaggttgagcagggtttcgacagtcaatgtcatgggctctccgttatccgtgacgcgctcgaacggcagaggttacaccacggcgtggagggtttcgtgacccgcgcttttcgatctcacgcgggatcagcgtaaaccaggacttgcggcagcaccgcccttgcccccccttcaatgagaagcttcagcctcggtcagcggctggcgcttggcccactccatcagttccagattgggaatgtgaataacgccatccacacgaataatgtaattgggccaaggaatatccacccccgccctctgcaaattggcaatgcgccccgccgcatggcgatcgaccttgtagcaatcgaacgcatactttgaagtctcgtccttggaattgtattgccggtacttcaccacaacggtgcattttttctgcggcaggtccgtaacctcgctgagttcagcaacgctcgcagggatcagcagcccgttcgttgcattcaccaggacctgctcgctcgccttgatcagcctatgccctttcgggatgttgaacagactcatgtccgggcttttgtcagcggcggtttcaagcaccagccccgtcaggatggccgcacgattgccgacattcgtcaccaacacctccatccggtcaaaatcgctgtaagccagcgtgatgtccagttttgaatagtcccctttcaaccaactccaggcgggaggaacaaccacagaggctatagatacaagggccactggcagtccgaaaagcagactcaaccgttccagcttgcccttagtcaacttcttcactcgattccctcttacacataggctgatgtcacggccagatagtggcacttaaccatcatgccatgccttggctcgaccatcagccgcctgagaggggtgttttcacgcctgcaactcacccgcccgatgcgccgccgcgtcgtcgtacaccacatacaacgactcggcgacttggctcttgatggccttggtggactcaaggcccagcacaaaaccctcggccttgccgccggcgcgattgagttcttcaggggtggcggcgccggtgatggcgtcgaacagcttggtggcatgggggctaacgcccttgggcaggctgatctggtcgatggacatgggcgataccttaaaagagagaattcggtagcgcgtgcaaccactgccggggtggcatggtagaccggctggctgagaaagggggctttttcatgaccctccccacaccaccgtgatagcgctaagctacatccccctcccgccccgcaggcccagcaccatgaccctctcccccgacttcaccccctgggcctcgttgctcggcggtgcactgatcggcctcagcgccggcctgttcatcctgctcaatgggcgcatcgccggcatcagcggcctgctcggcagcctgctggccaaacacgctgaaggccgcgctgaaaagggcctgttcctgctcggcctgctcgcctcgccctggctgtggtcactgttcgccagcttgcccggcgcgtcgatccaggccggtggcgcagcgttggtgctggcggggctgctggtaggcctcggcacccgctacggcgccggctgcaccagtgggcacgggatctgcgggctgtcgcgcctgtcgctgcgctcgctggtggcggtggcgtgcttcatgggcagcgggtttgcggctgtctacctcatccgccatctgatcggagcctgagcatgcgcaaactgaccgccttgatcgccggcctgatcttcggcctggggctgtacctcagcggcatgaccaacccggccaaggtgctcgggtttctcgacctggccggcgaatgggacccgtccctggcgctggtcatgctcggcgcgctcgccgtcagcagcgtgttcttctttttcgccaggcagcgccgcaccgcgttgctgggcgcgccgatgcagatgccgaccaagcgcaccctcgaccgccggctggtgctcggcagtgtggtgtttggtgttggctgggggatcgccgggctgtgccccgggccggcggtggcgttgttgctgaccgggcaatggcaggtaggagtgttcgtgctggccatggcgttggggatgtggctgtttgagcggattgaggcgcgcagattggccaaggcttgaggcgcgggcgggaggttgtgctttatctccacccgcccccggcctacattgaacgccttatcgatcaaccccgaggtcagcccccatggcacgcatcgtccggattcacgcctacggcgacgccagcgtcttgaaactcgaagacgtcgacgtccccgcccccgccgccgatgaagtccaaatcgacgtcaaagccttcggcctcaaccgcgccgaagtgatgttccgcaaccacgcctacctgcaagaagccgaattccccagccgcctgggctacgaagcggccggtgtggtagtcgcggtcggcgccgatgtcagtgacctgcaggtgggcgacgccgtcagcgtcatcccaccgctggacatcgcccgctggggcacctacggcgaagtcgccaacgtgcccgcccacctcaccgtcaaacacccgcaaaccctcagcttcgtacaagccgccgcgtgctggatgcaatacgtcaccgcctggggtgccctggtggaacaggccaaactgacccagggcgacaccgtactggtcaccgccgcctccagcagcgtcgccctcgccgccttccagatcgcccgcagcgtcggcgccaccgccatcggcgtgacccgcacccgcgccaaacaacaagccctgctcgacgccggcgcccaccacgtcatcgtcagcgacgaagaagacctggtggaacgcgtgatgcaactcacccacgaccaaggcgcccgcgtggtgttcgacccgatcggcgggccgggttttgaagccctcacccaaagcatggcccagggcggaatcttgctggaatacggcgcactgagtgccgagcccacgccgtttccgttgtttaccgtattgggcaaatgtttgacgctcaaggggtatctgtacgccgagatcgtcgccaaaccggcggcgttggcgcgggccaaggcgttcattctggacgggctggcctcgggcgcgttggcgccggtgattgcgaagacatttgcgttggatgaggtgcaggaggcgcatcgttttttggaggcgaaccagcaggtgggcaaggtggtggtgacggtgtgagggcggtgtcctaggacatttcccaaagcagggcagtggcttgcccgattgcctacgcctgcgtcagaatccgccggcttgtgcgctggggtggtggaatctatggttgcgcggtcgctgaatttttcggtgatcgggtttagtagcccggatcggttatctgaatgtgcatgagcttcatcagtcagacatcacgtctgtgcttgatggcggctgtgcgcagggcgtcctcggacgcgccggctttagatatccaccggtctactaacctgcgtacagctgccacccactcgtttagtagcggggaggtggtggcccaagtcaggatatctttatgcctcacgtcatgcaggattcaaccgtgctcttctgcgttgctccagacgcaagcaatgaagccctcattgccaatagttacgaaaccttcgcctctgtcagtacccttctgctcgatctatccgaagatctgagcggcaaacatcgagatattgcactggctatccaccaattgagtgaactgggcgtgttactcacagccaagctccttgatcgtgaggcgccctccgcgggctgaccatagctatccagaagacgaggcaggtcagtggctgagtcgaagtatgaaaaatgggggcggattgatccatgaagaatcaatttgtccccttttcagtggactcaaaacggcctttgatgaatggctactctcggccaaaagctgacgatggctacaggcagaaatcgacccactgctgccgtctagatcagacgtgatctttgttggagcgggcttacccgcaaagaggctacttgagcaacacacatactcttcgagcgatgtcatctgcgccatcgggaatgtccactgaaatgcctaaatagtgttcaaggtgcagggtgagcgtgtgttcatctaccaacagatcccagtagcgctgatcttgaccatcgagcctctctttccagcaacctcccagcccttgctcaagaacccgggccacgtcctcgaaaagcgtccagtcggcttcttctgatacttcaatcctcaccatgcgtcacctcaccaccaaaagtcccccgattctggtggctcctgcgaatggtcgcaatgggtcgaaagtcgtcaatcgcgaagcgcagctattggccgtgagctgcggtacgcaactgaaagcttccggcccaaaaaagcggctccgaatcgccgaatgaaggctaagaaacctgatcacctatcactatgaggggttctccgaaggttacatcagatagccgagtagcctcagctaatgcccgtaaaggggcaggcaaatcgaaaagtgtcagtggattcagtgggcggcattgcagctcataccccctcaaggcctggcgtgaatcgcgatgaacgtctgaccagtcgtacgcgaagaacccacgtttggcaaattcaacgaaagcgtttacgccagccctggcagtgacccgatctacatcggacacctccggcaatgaaaggacaaattcttcggagttttcgacggagggcattgcggaatcaggaaccggccccggcccacccgtagtgaagagcgcaacctgcccgagggcgtcggtggcgacccatccaacatcaaagtcctggagaacgaagggagccaccatttgcacctactttataaaaagggacgagttgatttcctaactctacttcccagcccggagtgtgtaaaagcgcgtcggcaaactcttaaagcaggaagaaattcgacgagttcattatcccagctttaaacatccggttctggccgattgctgcccgctacgacaggcagaaatcggccagaagcagcacgtcagcacgagcagaaatcgccagactattcaaccggtagagacaacagactagacactgcgctggcagaaagactgtctcagataaggcgaggccataagttggtggcaatacgctttgtctgtgtacgccatcacaatccgcacccctttgcgataggctcaacgacaagtgttgaaggcgctttccctgtctgaatatcaactacctccaatgcgcaaccggatttaggagctgagtgggtcacttggtagatcccccccgcattagggacgaagctactgatgctcaaacaactcctatggattaacggctgatccgtgttctcacgctccttgattcctgagctgagtgcgctcaggtaaatgcgccgatcaggctggattagaaatcgattcttttcaggttctgacggtgaaacactacctagcacaccggtctctttcgtgtcttggcagtgagcatcgtagtaggcccaatacacttggctgcctccagacatgaattcgtttttcccccaatgagcatcaagggtggcgtgcggcgcattcggtgccggttgctggtagtgaccaacacaaccagtcagaaaaatcgcacagcagataagtatggatttagtcaacttcacaccaacctagaaaaatccagaaatggggacatctggtccgttatcggccagtctggtttaaacaagagagttcgtctcaaacgttgacgatgttatgcggacgattcagatggggccaggctgtgtgaaaacacatttttagaacgattcggccatgggggcattcgaccaggttttgaggcaacatatgatctctaagaatccagcagctcgacgcagctcgcaaaccaaatcaggaagaatgaatgccttcccgtcgccgcctcagtagtgtctgtcaaagtattgcgcatcacgctgcgagcagtctgtcgtacgtacacccacatctgttgcaagccctcaaagcgaccggggaatcgatcgcgacggtggatctaatgagtgcgaccccatacccgaaggagcttctcagtcatccccaccttcccaccgccctctcttcactacgtgatcgttttgaacagattttgaaatctgaaggatttttaataaccgacctcaacgaggccaagctatttttcaaacctgatcgccaataccgtgacgagtattgttgcgaatgccacgcaaggttgtctcattcaagcggccgtaaatactttgcggcagtcaattgcatgggtaaatccattgttccccagcttgccaatatctgaccaatcccctccggtaatgtcttcaatccagatgaaaagcgagctttaaggccaaaagtcggaatacgccgaggatgatctaagcttttgttcgtctagatcgtatcgggggcgatcatgaagcgatttattgaaggtgaggctcggacgcaagtcaccttgctgccggagtgtctggacgattacgtagccgaagaatggagaattggggccagcccacgttatcaataatggtgtgcctccccctattccccctgaccaacccgcttgctgtgggacttgttgttgctgaaattgacatcgccggtacaaccgcgatctgacccactttgcgtcggctacggaatgcacctgttttcttgcggtctgtagcacaacgctgcaaaggactcgcgccatgtcgattcgccccacgctctgcctgttgatcctgccactatttgccggctgccagtttttcccacagacccattacttcaccgcccccgacaacgagccgaaccccgcctgggtacgcatcgtcaatttcacgcagcacgccgatatctaccaatacgaaaacggtatgcgctcgggcggtgtcatccgcagcgggccgctgcccttcatccatacgcaggatcagggcatgcctaaagccgggcagcatttgacgtacgactattatgaaacccgcgtgcggcccggcatcggaacccatgtggggctgttctgggaggggccgcgcactcaatcctgttttgtcacggtgcagttcacgccgcaggctgggcgttactatcagttcagcctgacgtcgggctccagcggcacctgcacggccaggccctcgctgatcgagcgcgataaagcgggggcgggatggcatctcacgcctaatccgcaggtgacttactcgcctgtcggccccaccgccaaaacccactacaacaatagtcgcttcgaggacccggattaccagccacctcccggtctctatccggggatgtagggatcagcgaccaacgccagcaactcattcaccagttcaacggcttcctcctgatagccctcgcggagaattggagaattggggtcagaccacgttttcaagaatgctggtctgcccccaattccgttcaacacaaccgaccagaagtgaacactcgacactagagccaatggtttgagaaagtaccgatcagacaagctaccccgagcacagagggtttcatgcaatggattgttttcccacgctttgcactaaccgcctgatcctgacgccgcttcaattgactgatgcgacggcggtgcagcagttgttcccgcaatgggaggtcgtccggtatctggacaaccgcgtaccatggccatatccacctgatggcgggctgacttacgtgcgtgatgtagctctgcctgccatggcgtcagggcgagaatggcactggatgattcgcttgcgcgctgaacccgagtgcagcatcggcagcatcagcctgtttgaccaacctggcaaccatagaggcttctggctcgctccgcagtatcaggggaacggttacatgcgcgaagcgtgtaaggtcgtcaacgcttattggttcgaaacattattgcgcccggttatgcaggtgcccaaggccgccctcaaccacccttcacgcaagatctctcaacatgaaggaatgcgcatgatcgggacgcgggacggacattttgtctccgggcccatgcaggttgaaatatgggagatgtcgagaagcgagtggctcgctgcagagaatcaagcttgacctgcttcgtccatgtcagtgccggcggcaggggtgattgctgtcactcgcattaggcgcgggcccctcctcgcttcccacgtttgaaccgtctggcagcacggcttgcaacgcctcttacccatcggctggaactgaccgtcagacgtttcagtaaacgcatgcactggcctgcccggaatcgaaccgcgcgcaagacgcgacgcctgtcagcctcaggtcgcgcatccatcaggcatagcttggtagtggccagagccacttttgccccaatcgctacagcgacagccaggaagtacagccaacgatgattcttggcttgatcatgttgacccacaagcgcagacaattgcttcaaatagggcttagcagcagcaagccgcggaatgatgcattcgctcgccaatgccacggtttggctgccgatacgatcatccacaaggcccgcgggaccatccggtttcgccatgcaaaagtggtgggggacatactcgcaggtacttgagagcggcgatgactgcgaaatgtcgcccgataagtacttcaccggacatagcgtttgattgtagtcggcgatctctttgcgaatagcgattacatcctcatcgctcaggacccagcgactcgcggagtaaaaccctttggagtcattcggcgcgaactcgatgaattcgctggcttcaccttctttgatgttggtgaaggtccactgcgaatagcggctccactggcacgacttcaaatcatccagtccattggccttgcagtagtcgtcatagcgtctgatttggctcaacaagtagccgctggcgtcctggatgcctgacgtcgcctccttgagcatggcgttgtcctcgctggcaccgttgtctgctacgaagaacactgcagcgaccaatgccagcgggaaccagaaatggtcgtagatctggcggaaccgttcggtaaggttgaggttgtcatacgcgagaaccatgatgccccagccggtgatggcgcacagcatcaataggggaatcagcccaatctcactgccgagtttccccacgccatggatggtgtagcgcgttggcaggtaattgattgtcgggaataggccgaggcagctcaacacacctggtaggagcaagattcccaagtagataagtaggccctgcctcttgcccacggtataggctgtagctgccagcaatggaatcaccaacagtgacagcatcatcaggtagcccagcgtgatcaccattgcttgatcgggtgaccaatagctgccaatgattttcccagcggtgtcacgttcggtgaagcttgatgacacaacgtccaggccttccaaaatttggtgcaggttgtacgccgcgccatggaggaaggttacgtatgggtagaagaagttcgcgatggaaactggcattgacttaagtccttgaattactggcgcattccttggctatgggaagaataggggtcagaccacgttttcaataatggtagcctgccctctatttctgccagccacctcccagcctcaatccggggatgaagggatcagcgccagcaactcattcaccaatccaaaggcttcctgctgatagccctcgcgccagcgggctgagaaatcctccggcctgccctgctcttcccactcggccaacgccaggccattgataatttccagctcgaaccattggcgctgccaggcggcagcgtcggttaccagcgtggtgtcctgccacaggaactcggtgtgcgcgacaaattggctccacgcaaacagcccgtgtgaagccctttcgccctgcgcggtcaattgcgctttattcaccctcggtgccctcacgtttgcaattcaatccccactgaaatagcgccatgcccataacccgcgccgtggggtaaggcagtagaccctttgcgcaggcaagagaataagtgcgcaggagccttcggaccaccccacgattacacacgggggattaaggcgacggatttggtttaccacgtttacactggcgccttttgcgccactcactcaggcacgcttatcgacccccttacgaatggaatcgacaccatgctcacctccccgcgcccactcaaaccgctcatcggcctcacccttctcgccgccctcaccggctgcggcgcattgacggatgtgcgctccttctccacgccctacgccacgcccaccagcgctgaaaccgtgcgcctgcgtgtgatgagcgatggcatggtgcgcgccgtgcccaattccaactgcatcaacttccgcctgcccggcgcgggggtgatggtggccaaccgagagggctacgcagaccgcaacggcgaaagcctgggcatggcgcccgtgcagcggtcttcggaggccacggtgatgagtgaactgcgggtgccggccgggcagcccatcgcgtttcattacatcggcaatcgttgctacaacatgttcactttcgtgcccgaggcggggatggattacgaattggatgcagcgggtcgctataagtgcggggtgacgctcaagcgcatgttggtcggcaagactgagggcactcgggtgccgttgggtgagagcaagttgtgcaactggggcgataacttctgagccacgtctcgccctcagctgtgcaacggcaacgccaccccgaacaacacgaagaacccgccacagactttattgaaccgccgcccggtgcgcgccagccatggccgcacccggtgcgcggcgctggccaccaggtattcgaccacaaactccaccacggcgtaggtcagcgcgatgatggcggtctgcgtgatgatgtttctgtgggggtcgaggaagggtgggataaacgcggtgaacagcagcagcgccttggggtttgagagggccgagaccaacccttggcggaacagcgaccagcggcgcaggctggtggtagccggggtttccaggctgacgggggcggcgcgccacagcccgtagcccagccagatcaggtagagcccgccggcaatcttcaaggccgtaaacgcggtggccgaggcctggatcagtgcgcccaggcccagcgcacacagcgcaagcaccagggcaaagccgagcacgccgccgctgatggtgaacagggttctgcgactgccgtgcagcgcgccatgggtcagcgccagcaacgcattcgggcctggcaccacggatattccgcagcaggtgatcaggtagagcaaccaggtctcgaagggcatgatcaagtccgcaatgggtggttttggctgctatcttgcaaatgaacaacgaccgtgaaaagcgcataattcacgtcgcagccattcgattaacgaataaaggtcagcaccatgtcttccagcgatttgcagatcgattggctcaagtgcttcgtcgccgtggtggatgccggttcgctgtcgggggcggcccatgaggtgaaccgctcgcagtccgccgtcagcatgcagatgaaaaaactcgaggcggccctgggccggcccttgctcaaccgtggcccgcggcacctgcaactgaccgatgacggccagacgttgctgggctatgcccgtcgcatgctcgccctgcacgccgagacccaggcggcgttttacggcgaggcattgaccgggcgcatccgtctgggggttgccgaggactacgccgccaggtacctcacgccgctgctcaaacgttttgcgccgcgttatgcgggggtggacatcgagctgacctgtgaacagtcgaccgcgctgatcccgcgtgtgcgcagcggcgatcttgatcttgcgctggtgtccagggactcgccgcacacggggacgtttctgttcaaggagccgatggtgtgggtcggctccgcgcaattcgaactatggcgccgcgacccggtgcctatcgccgtctacgaaagcgaaagcctggcacggcggtatgcggtgaattcactggcgcaacagggccgccagttcaaggtggtgtacaacagctccagcctggccggccaactcgcggccgtggaaggtgggctggcgattgctgcgattacagagtgcaccgtgcagccatccttgcaggtcttgagcagcgaacatggcttgggcgctatcgaaccgatggaggtgtcgattctacgtagccgagcttcgcgcggatccaaggcggtcaacagcctgcatgggtttatcatcagtgcgcttagagctcaggcgtagccctggcgcgtcgcgctatctggacaccgaggtgatcccatagcagcctcgctgaagctcgacagctcctacaattgatctgcattcggagctatacatggccctgtccaaacgtgaaaccgttggtatcgaacgccaactggtcgctgcactgactgacgcctgcgaaacggcgaaggctgaaatcccggggtttgaatggctgacccacacggtcaactacgccgacttccctcaaagcctgcgcatcacctgggtcttcgacacccgcgccaataaagaccacgcggtggcgaccgggttggacgcacgcatccgcgaactcacagccgcggccctgcacgacgccgacatcccacccgtgccgttgccgcgctgcgttcaacttgactccgaagaagcctgccaaacccagcacggcggcaattggcgtttgcgcctgacccgctcagccaactagagcctggcgcccaactgctggataatgcctcgccctgctctccgcccgctgaaaaggaaatcccgccccatgaagttgccgctttccgctgccctgctcgcgtctgccctgctgtcgccttcgatggcccacgccgaagacgccgcactggtcgacaccctcaaggccttcacccgctgcgacgcgagttttttcagcagcctgaacacccaccgtgacgcctggcaggcctacgccccgctcaagcaagagaaggacttcagctggatcgcggtgcgcgatcgcaccgaccccaaggccaccgcagtgccggtgagcgcgccggccatcgccggcttgaagttgctgtcgtacaacgatgaggtcagcgatctcggcccgctgggcctgtattacttctggggtttcacggtggacggcaacattgatgaggtcgcgcagcgctttgccgcactgctggaccaacccgctgcgctgcaaaaaggcgaagggcaatacacgcgcagcgagctcaaggtgggcaacagctggcaggcgatcaagccgatgccgggcaaggcgccagggctgcgcaatgtggagcgggtgctgatcgtggagccggagggcacgcactcgcgtgtgagctgttcggtgcagggcggggtgactcccggcttggtcgcactgctgcggccggacattgcgccggtggattacccgcgcacggtggccgagacccatctcgccgacgtgccggtgccgcccactgtgctccagggcctcgacgcgccgctgttgcagcccaggttcaagacgttgagctacacctacctgtcgaagaatgacgcgggcaaggacgcgccgatcacgatccggttcaaggccgagggcggtttgctggtgaagaatgaggcctatggcaacgccttcaatgtggaccgtttaatgctggcagacctgatccagctgaaatcgaaaatgaacggcgtgggcgaaggccaggtgctgcagacccgcgaggccgaggtcaaactaccgaccagttgggcaccgggccagaccctgagtgcgcacctgaagatggccaatgtgccggtcaagcccactgacaaaccgaccgaaaccaccttgacctgcaaagtcggcgagcgcttcccggcgcgccaggtgtttgcgtcgttgacgggcgatgccatccggctggcctgcgagcaggacggctacacgtcgtcgcgcgcgtttatcgaggacctgggggtggccctgacgctggagtcgacgtcgagccagacccactatgtgaatgaaatccagacgctggacgttgtgcgctgattagggctccacgccacgcaagaacacatcgaagcggcgactgatcgcccgttgtgtttagccgcagtcgcactcaacgtgtgatgagccggcttgttgtggtgagcgggcttgccccgcgttgggtggcgcagccgccccaataaatacaccgcattctttcagacagaatgcggtgcctggtctggggccgcttcgcgccccaacgcggggcaagcccgctcgccacaacaagcccgctcaccacagataagtttgaacaaccacagcaagcccgctcaccacaagggattagggggcagttagaagtggcgtatgagcgaaccaaacaggtcgccccggggcatttggctcaacgggatttcggcgttctcgaaccactgcgcactggcttcaggatggggcccgctcagtatcactacgcctttctcgaaggtataccgcgccgctgcgacgtcgccgttgcggtaggtcgcgatggccgtgtagggcgctacctttgggaagtaagggccgtcctggaagaacacctggtcgggcttgccgtcccatgtgacctgcacggcggcgtcggcgctgtcgggcacttcgaaaccggcgcggccagcttcgccgtcgaggtccaccgggatcaagccgaggttgctgtcatccgccaggtaggcgcccatgcacaagcccaggtagcgcccgccgttggccacgtaatcgcggatcgcctcgctgcgcgcatcgcccaggctgcgcagggcgccggggatgtcctggccgccgccgggttgcacgtagaggtcgtagcgcgccagggtttgcggggtgatgtcgatgggctcgtcggcgcccacgaagtcgatgcggtagttggggttgatgcgctgcagggcctttgccacgttttccgaacagtcatcgcagccagccgggccacggtagatggcgacacgggtgataggcgccgaggcttcggccggtgacggcagcaaaagggcaaaggcaaacaacgtggcgacgacagctcgcaggttcatggtcaaggactcctgaaggaccacgcaaagcctatagcgattgcgccgttgaatccgttaacagttgtaaacgacgttgagttggggataactggtggtcgagccccgttccgagagtgcttatcatgtttgaactcaccgccctcatcacctatatcgccgtcgtgatcggcctgttcctgatccccggcccgtccgtgttgctggtgatcacccgcaccgtgcagggcggccgcaaggtcggggtcgccaccggcctgggggtggcgtgcggcgacctgctgcataccctgggggcggcgctgggcttgtcggcgatcctgatgacctcggccaccgcattcaacgcggtgaagtgggcgggcgcggcttacctgatctacctgggcatccgtgcgttcatggccaagaccggcacacagaaggggctgacgttgcctgcggtcacgccgcgccaggcgtttttccaggcggtcggtgccgagttgctcaacccgaaaaccgcgattttcttcctggccttcctgccgcaattcgtgcacccggaagccggctcatcactggtgcagttcgcggtgctgggtttgattttctcggtgctcagtgcggtgtacaccagcctgctcgcgctcgccatccgccccttgagccgaggcatcaaggggctgtccaaactgcggcgctgggaaggaaaaatcatcggcacgctgtttatggggctggggctgaaggtggcgttgcaacagcgttagtcacttggcaaacgcatactccccaccctgctccaccgccttgcgataggcaggtcgggcctggaatgtttctacccacgccgccaggtgcgggtaggcctgcaatttgccctgggccttggcgatttcgccgataaagctcatctggatatccgcaccgctcagctcgtcgcccagcaggtacgttttatcggccagcacgtcgttcaggtaacccaaatagttggccacttccgattcgatacgcggatgcaacggcgcgccggcatcgccgaggcggccgacgtagaggttgagcatcaacggcaacatggccgagccttcggcaaaatgcagccattgcacgtagctgtcataggcagcgctggccgggtccggttgcaggcggccctggccgtgatggcggatcaggtagtcgatgatcgcggcggattcgatcagcacctggccgccgtcttcgataaccggggatttgcccaacgggtggatggccttgagttccggcggcgccaggttggttttcgggtcgcgctggtagcgcttgatctcgtaaggcaggccgagttcttcgagcagccacaggatgcgttgcgaacgtgaattgttgaggtgatggacgatgatcatggcgtgctccgcagggcgagagggatgtcttgggaacagactacgccagcgtccgggagtgccgacaattaaatttcaacgcgacaaacacgcgtggttaccatggggatcgaatccacaggagttccgccatggacctgaagttcagtcacgtcgacatactggtcgaaaacctcgaggaggcctgcgcctattacgcaaacatcctcaaagcacgcatctccaagacctttgtgtgggaacgcggcggtttgcatgtgcgctatgccgtggtgctgatggggcaagagcggttcatgttggtgcagccgattgccgggaatctgcgcgagctgctggacacccacggcgaaggcatgatttaccgtcattgctacaccacgccggacatcgaggtcgcctatgacgagctgatcgccgccggtgtgcagcccgagaatgaaaacggcgtgcccctggcccgcgagaacctgcagtcgccttctggcgggcggattatctggctgcccaagcgcttcgggcacttttccatggagatcctggaagagaagacactcgaggcgtttattgtggaggcgtttggctgatcgacgcccacgccgcctgggccagtaactgcgcgtagtcattcgggctgttcttgacccgcccggacaaccacgctcgggcgtagttttctgccgcgccaatgatcagcgatagcaaaagctcggcgggaatgtggctgaacgcttcagcgcggcccgcctcgctcatccactcggtcaactgccgattgcgctgtttgttgcgggtgagcaattcatccttgaacggaccgttggccacggcgaaacggctctggaacacaaagcgcgcccagtcgggttgcgcgtccacccactccacatagctgcgcaccagtgcctccacgcctgcctgggcggtttgcgcctgcgtcaggtagtgctcacgcaggacggcctggtcctccagcgcggcaaaaaacagcgcggcaacgatgccttccttgctgccgaaatggtggtagatggcgcccacgctggtgtcgcaccgcgcacggatggtttcgatgttcgtggcttcaatacccacttcgttaaagcaggccagggcctcgcgcaggatgctgcgcttgaggtcgctgcgccggcccgggaaggtgcgctcgatcagatcaggtgcgtgcatgaagtcgctcgccaaatgtgcggagtctaaaggtacggcagccgcgagagaaggcatggcttgacactcttgagatttacagaatattgttccgtcacagaatattattctgcaaacctatccggaggaaatccatgagtcagtttctcagcatgttcaacagcgcaggtccagccgccttcagccagatggcctgccaggtggcgccctacttcagcaccatcaaccctgaaatcgccgaactacgcccaggccacgcggtggtcaacgtgccgtttcgcaaggaaatcaccaaccacctggcctcggtgcatgccattgcgttgtgcaacgcagcggaactggccggtggcacgatgaccgatgtgtcgatcccccaaggcgccaaatggattcccaagggcatgaccgtggagtacctggcaaaggccaagtcgaacatccgtgcggtggcggatggcagtggcattgactgggcaacggctggcgacaagatcgtgccggtggatattttcgatgagggcggggtgaaggtgtttacggcgaagatcaccatgaatgtgaagatcgcctgaggccacggcagcaggaggaggacctgacccgatgctgaaaacagcgcaggacaaaatgtgggagggggcttgcccccgaatgcggtgtgtcagtcgctgaatctgttgactggtacaccgcaatcgggggcaagccccctcccacataggatctggtttgtttggaagacagctcagcccaggcggaaccgcgcagtgttgtcactcagtgcctggctgcctttgctcagggtgtcggctgcgcggttcactgcccgcgcaccgtcgagcaagcgcccggcggcctggtcgacttgctggatgttgccactcacttcatccgccgtcgccgcttgttcctcgacggcggtggcgatctgcgccagggtgtcggtcacgtgctgcaccgccccggcgatctcgcccaaacgggtgcccagcccggtgacggactccgcgtccgtcaacgcttgttcacacgcggcgcccatcagggtcaccgcctggctgaccgtggcgcgcaggctgtcgacggtgccggcgatctgcgcggtggaggcttgggtgcgttgcgacaggctgcgtacttcatcggccaccaccgcaaaaccacggccctgctcgccggcgcgcgcggcttcgatggcggcgttgagggccagcaggttggtctgttcggcgatgccgcgaatggtgtcgaccaccgattgaatctgctggccctgctggctgacttgctccagcgcatcggcggtgtcggtcaggcgttggttgagctgctggatgctggccgtggtgcgctggctatcgcggctgctgtcttcagcaatacgccgggtctgctgggcgctgcccgaggcctgttcgcagcttttggcgacgcccagggaggtcgccgccagctgggtcgcggcggcggcaatctggctgatttggtgttgctggtcttcgacttcggtgagggtgctgcccgattgcgaattgagggtaagcaccgccgagccgagctgctgcgtctcgtggttgacccccagcagactggtgcgcagttgcaccaccgccacgttgagcgcggtgctgatggccgccagttcgtcgcgcccttccaccgccacctccacgcacaggttgccgtcgcgcagggactcggccagggtggtgatgccgctggcactgcggcggatcgaagcttgcaggcacatgaacaggtacaacgcggccagggccagcaggctgaatgtcgccgcgacggggacgaacttctgcaacgagcgatcgcggtagtgacccaggcgcgcatccagcgaatcgagggattggttgcgcagcgcacccaggctgtcaagcatgccgtcgacactggtttcgaaggcggcggtgtcgagcttgatggtgccgccgaacacgccgtcgtcgagtactttgagttggttgtccaggcgttgcaggctggtgtcgtactgggtggtccagggttccaggccggcgtacggcttggccttgagcgatgccgccgccttgaccaactggtcgcgcgcatcgccgatacggccgcgcaggtcacgcatctgcaaacggctttgcaaggtgaattgccccgaggcgatggacgactggccgacactggccatgcgtccgatgcgctcgatcaggtccggtgtgtgctgggtggacatctgcatcaacaggtaggtttccagccatgggtcgaggatcaggccggcgtccagggtgatctgttcgcgcagggtttgcatggcggtcagggccgaggtgaaacggtcgtaaccgtccggccaccagcccacggtgcgcagggactgggagtccatgcccttgaccgtggcctgcaacgcttcgaagcgagccagcacgtcggcgccggcatgctgggccttgagtgaatcccccagggtttgcaggctctgcaggatcagcgggaaattcgcatcgaccttgtccatcgccgccttcgccgccggcgtcggggcgtgcaggatgtcggcggctttccagcgcgcggccaggttgcgctgcgccgtcaactggccgtccagcccatccagggccagcagttggcgaacgccggattgctcgctggaaatcacggtcagcttgtcgcgatagtccgcgccgatcatccacaggctgcccgccaggggcagcatgaacaggaagaacagaatctggaacttgcgcgcaaagccgaaccgccccagcaggcggatacccggtgataaaaggctgtgcatgtgcaaacactccccaaaaacgacccaggcggtgcaccgctgggtgaagccttgaaatgactaacggcaaaatgccatgtcattgattagattggctcaagcaagatacgggccgttgacagaggggctggagacaggcgggctcgcgaggtgagggtgcaggtatcgtgctcgaaaatggggcaaaagcactcagcattgaagacccagctgtaactattggcgcagtctgtaataacagcggaattacttcccgctgatcagcacttttctccccgctcacactgaaatctcctaacaccactggagattcatcatggcacgtgcacttaacagctccgaacgcagaaccttccgtgcagctcgctatgccgcgttgcgctcgctcgaattcaccattcatcacttgaacggcggcaatgccgatgtcgctcgggtgtggatgggcgtccagcaacctggaaacctgcaagccttggctcaacgtctgtaccggatttttcaggcactgcagaacattcatgaaggacaggtcaactgcgaacccaacgcaaattggtatgcagaggtccaccccgacgacgcagggcatcacatcacgctggggggtgcattcttcaacgccccgacctacggcaatgactcgcgtgccggcacgttgatccatgaaaccagccatttcaacgatgtgcttggcaccgacgaccacgcctacggccaggaggcctgcctgcgactggtgcaacaagccgagcaaggcgatggcaacctgcacactgtcctggccaacgccgacaactgggaatacctggtggaaaacacctattgagttgcggcagcgacactcggaaaaagcctgttctcggacaggctttttcatccccccactatcaggagttgaacatggaacgtcgattattgattggcgcctcgctggcagcactgtacctgttggcaacaccggcacatgcgctcagcactgccgacgctgaacctgaaacactgaaagcgtatgccgtcacactgaacgctcacgcgagcaagttccagtggcagcaattatggaaagcctcacgtgaacacggttatttcaacaacggttctgctacgtatttcacgacaccgatgccgcacgtgcccgacctggtgtccgccgtcctgaataaggcaacgagcgttaccccctttgcctcaactcgggccacttaccgctatgactttgcggcaaaagtaggtttatccaacaacgtggccgtcacagcgctgtgcgttgatgtggactggcgcacgctacctgatggaaccgatgttgaaaatgcgcacgcgatgcaatcggtaaccctgttgctcgcccaaccctgcccatgatgcaagcagccacccgggatgtccccgggtggctgtatccagagtgttacaacgcactcgccaacaaagcagcttccttgcagcgtcgggtggaatagcgatcgccgaaattcctcaagttgctctcggctgctttccagtccgctgccacaacttgcgcccaaaacttcggcgtacggctcgcaaggttgccgtactggaaggcaaccgaggcgatcacggtttgcatcggcgccggcaatgcatcaaacgggcgtccggcagccttgctgtaatcactggccaggcgctcgatgaagggcgccttgtaggcctcgtcgatcctgcatgcatcctgcacactgacattcaacggcaggcgctcaaggcatgccacggcttgcgcaccgatcaaccccaagtagggtaaaagccgctcgctgagatcctggggcagcatgtccaggttcttttgctggcccaggtcaaagccggtgccgatggtgacgccgctacggctgttttccggatcaggcacgtaaccacgggtggcgctaccgccttcgagccgggcaatgaaggccatatctattgaattattggtcatggtgagtttcctcttggctttaggaaactgcagtccatcactcacgccatccgctcttcagaaggtaaaacttcctcatcttcataggtaaagtttcctactgattattcgcacgcattacttcctaagctctgaccagctctcatcacaaggaggttaggccgatggaatcgaaagacctggaacacatcgatgttcgacaactcccccattcccttcagatgctggttgcctgtatcggtctggaaaacgcattccgcttgacttgcgtatatggcggacgccccaagtacatccccaaacacgcacaacgtacttcgctggcgctgattttatcgccggaagccttacaggcgttgatcaatgatttcgcaggtatttctttagagattccaaagtccgatcatttttttcggcagattcgtaatcagcatattcaaatgggtatttccgatggcgtatcacgtagtgcactggccgagaaatacggactgagcctgcggcaaatcgcgaatattcgacgccaggatatttgtattcatcggtaattacttcctactgaatcagaaagtgccacatggatagattcaagttgcgcactttcgcgcactcacgataaggaaattaaacatggcagatattgataaaggtctcattggaggcgtgatcgccgcacttccactggacaagatgatcaccgggccgctgatggcaatgatccaggcacaagtcgccgccagtaaagcgtacgcggactttctcatgggcgtgtgcatccaggacggcaaggccgtttcggtgcagttcgactatgacgaaaccctcgtcgatgagcaggggatctacaagggcacggtcagcaagaccatgcgcattccactgctggccgcaatcagccaccccaacattaccattgaggaaggcagcatcgagttcgagttgaccatcacccaaatggccgaggacactagctccaatgatgtttccggcagcttcgacgccaagatgggctggggtcctttcagcgtttcagtcaaaggtgccgccagccacaagtcatcccaaacccgcaagactgacacccgcgcacgctacgaaatcaagaccaaaatcgttcgccaagacccgccggaagccttgatgcgcgtcatcgatttcctcaccgatgccgccaccaagccggtcaccctgccgagcgccaccccaaccagcccgacagagcttccaaaagcaggggtactgcctatgcctgacgccaaacctgcggaaaaaaccaaatagtcccaccccgccccgccccccagggcggggcaacccacttgacttgaaaggagctcaccatggcatttttttcgcgccccaaggaacccatgtcggccagcgacttgagccacataacacgcgggctgcaacaggccgctgcggccacgcacaacctgatcgtccatcaatatattgcgctgttcgaccagttcttcgattacaacgttgaagacctgggcacgccgatgaaggccaagatggttgaggtctcgctgaccgaggggcataccatcagcgtgccgctgatcgcactggtcgcaccgaagggcttggcactgcacaagatggatgtagacctgtcggtaaaaatgcacagcaccgaagtgcaaaaagccagccatgacctggagaacggcgacctgcacagcgagaagtttttcgtgacctttggcaccactaagcgtgagggtcaagagcgcgatcccgatgaggtgcagatccgtatcgagttcaaggcgtgcgagccaccggaggcgatcaaccgaatcatcgaggagtacaccaacttgatcagcccgatggcaaacgcgcccggcccttcctccgctaccggacaacccaccgcacaacccccttcggacttcgcaccctaaaggccatgcctttcaaggtctttgaaaaaccggcgatgtctggctgatagcctcccattaagagcgagcactgcaactgtggcaagcccgctcgccacaaaggacttatcgcctgttctacctaaagacttgaaagggctgaccctaaaggcgttttaaagggcctattgcgtcaccctgtaccggtcgaaattattgatgtgatcatccagattatcctcaagcatcatccggtactgatcgcagaagtacttcaacatggcctcccgtgcatcggccatttcagctccggacttgaagttgcgtgcactggcccaggcattgaagcgcgtggtgccaaacatcatcgaggcgctgacctggccgaggttttcgtgggtctggagctgctcgttcgacagctcgatatgcgcgtcggcgcggtcgtagaaagtggggtcgatggcgtctgccatggtggttttccttggtcatcaggtttgaatgagggtagatcaagccagcagcgcggttatccacctggcctgtcgggaaatctcctgccacttgtctggcggcactgcctgccgcgcctgctcgaagctggccagggtcttgtgcttttgctgcaacaggcgctgccacttggcaaggaacgccgggctacgcgcctgcatttgcagggggccgaagtacagctgttcggcggtgtacgccaccggcccggtgcgctcggcgacgatgatttcgtagtagaaacggttctcgcgcagcagctcttcatggaggatggagtaaccgttgtgcatcagccattggcgcagcgcttgttcgccaccgttaggttgcaggatcaggcgttcctggccgctcaggtgcagtttgccgttttcaagaatgtcgcggatcgtctcgccgcccatgccgcagacgctgatggcggtgatgccgtcatggggttcgatggccgccagaccatcggccaggcgcacggtgacctgctgctccaggccgttgtcgcgcacggtacgttgcgccgcatgaaagggcgtggtcgcgacctcccccgccagcgccgccgtgatcgcacctcggcgcatcaacgccaccggcaggtaagcgtgatcggaaccgatgtcggccagtcgcgcgccagccggtacgttggcggccacgcgctccaggcgctgggataaggtgtgttcgttcaacggccctgctccccggaaaaccgatcgcggctgttggtcaggtgcaacaccatggcggcgcgggcggcatccgggtcctggcgcttgaccgcgttgaagattgcctcgtgctccaggttcgccaactgccccagcttggcaaaatcggcgccgccacgttcatcgttcttcacctgggtacgcgggatcatcgcattgcccaggtgcagcatgatttcggtgaagaaggtgttgccggtggcctcggcgatcagttggtgaaaacgtttgtcttcctccacgcagctgtcgttattggccagggaagcctggtagtcgtccagggcctggcgcatgtgagccagttgggcgtcggtcctgcgaaccgccgccagagcaacggcttgtacttcaaggcccaggcgcaactccagcatgttgcgcacgctggccaccgtgtccacgtgcaagcgcaacccctgctgggcctgctgctccaacacaaaggtgccaataccgtggcgggtctcgaccaggccggacgcctgcaacttggagatagcctcgcgcaccaccgttcggctcacgccgtgttcgcgcacgatggtggattccgagggcagtttttcaccgggtttgagttggccgagcaggatgcgctgggtcaacgcgtcgaccacgccttgggccaggttggtggagcgtctgcggacagagcttccattatcgatgggcatattacgtgtccacagggttgagcagcggcaagcttaacattcccacctgcccgtcgcgtcttcaggatgtttgatgtcaaaaaaacaatccacttgtatgacaacacactaaaaacgcattttaaaaatcaaaaaaccccaatactgttgcgaaaaaaataaatcaacttgtatgatgtctatcaacaagacacacacacccgcataaaaacaatcagggggagttttgaatggtgaccacttcaagccacgcatctgccacacccgaaaatgatccagtcctcacgcgcgccgtgagcaaagtgaagggccatgtgctcccactgttcgtgatcatgttcatcctcaactacatcgaccgggtcaatatcggctttgtgcgcacgcacatggaacacgacctgggcatcggcgctgcggcctatggtttcggcgccgggctgttcttcatcggctacgccctcttcgaagtgccctccaatatgctgctgcaaaaggttggcgcacgtatctggctgacccgcatcatgttcacctggggcatcgtcgccacgctgatggcgttcatccagaacgaaacccacttctacatcctgcgcttcctgctgggtgtggctgaagccggctttttcccgggggtgatctattacttcacgcgctggttgcccggtgtggagcgtggtaaagccattgcgattttcctcagtggctcggcggtcgcgtcgctgatttccggtccgctttccggcgcgctgttgcagatcgaagggtttggcttgcatggctggcaatggatgtttgccattgaaggcctggcctcggtggcgctggggttctttgtgtggttctggttggactccaaaccccacgacgcccaatggatgacccgcgaggaacaggacgcactggtcaatgccatcgaccaggaacaacgcgaccgcgaagccctcaccagcgtcaagccgaccctcggcaagctgctcaaggaccgccagatcctgctgttctgcgcgttgtatttctgcatccagctgacgatctacgccgctaccttctggctgccgagcatcatcaagaagatgggcgatttgagtgatgtgcaggtcggcttcttcaactcgatcccgtggctgatctcgatcatcgccatgtacgccttcgcctcgctctcgggcaaattcaagttccagcaggcctgggtcgcggcagcgctgttgattgcagcggcggggatgttcatgtcgaccaccggcgggccgatcttcgcgtttgtggcgatctgttttgcggccatcggcttcaagtcggcgtcgtcactgttctggccgatcccccagggctacctggatgtgcgcatcgccgctgcggtgatcgcgctgatcaactccatcggcaacctgggcggctttgtggcgccgaccaccttcggtttcctggagcagaccaccggttcgatccagggcggcctctatggcctggccggcacctcggtgctcgccgcgatcctggtgttctttgccaagacgtccccctctgccgcattgaagccagcgagcggcgtgcccaccgccgctctcggcaaaccactttgagcccagtcaggaacctgccatgaatactcccgtcgttacgcacttccaggtcatccccgtcgccggccacgacagcatgttgctcaacctcagcggcgcccatgggccgtacttcacgcgcaatatcgtgatcctcaaggacagctcgggcaacaccggcgtcggcgaagtgcccggcggcgagcgcatccgcgaaaccctggaggacgcccgcagcctggtgatcggccagcctatcggtcagtaccagcgcatcctcaaccagatgcgcagcgcctttgcttcacgcgacgctgccggccgcggcctgcagacctttgacctgcgcattactatccatgccgtcaccgccatggaagcagcactgctcgatttgctgggccagtttctcgaagtgccggtggcggccttgctcggtgaaggacagcagcgcgatgcggtgaaaatgctcggctacctgttctatgtcggcgaccgcagcgcaacccccctcgcctaccgcaacgaagccgacagcgacgatgactggttccgcctgcgccatgaaacagccctgaccagcgacgccgtggtgcgcctagccgaagccgcccaggccaaatacggtttcaacgacttcaagctcaagggcggcgtattgagcggcgatgccgaaatcgaagccgtcaccgccctggccgaacgcttcccggacgcacgcatcaccctcgacccgaacggcgcctggtcactgcaagaggctatccgcctgtgccgcgaccagcaccacgtactcgcctatgccgaagacccctgcggtgccgaaaacggttactcgggccgcgaagtcatggccgaattccgccgggccacgggactgaaaaccgccaccaacatgatcgccaccgactggcgcgaaatgggccacgcgatccagttgcagtcggtggacattcccctcgccgacccgcacttctggacgatgcagggctcggtgcgcgtcgcacagatgtgccatgaatggggcctcacctggggctcgcactccaacaaccacttcgatatttccctggcgatgttcacccaggtcgccgccgcagcgccgggcgatattaccgccatcgacacccactggatctggcaggacggccagcgcctgaccaaagcgccactgaaaatcgaaggtggttacgtgaaggtcccaagcaaaccaggcctgggtgtggagatcgacatggacgcggtggcccaggcccacgaagtctacaaaggcatgggcctcggcgcgcgggatgacagcgtggccatgcaattcttgattccggggtggcgcttcaacaacaaacagccgtgcctggtgcgataaacgcccacccactgtagaagcgagcttgctcgcgaagatcgccaacgaaaaacgcgccccccccctgggtaaacgcgctgcctaggttttcttcgcgagcaagctcgctcctgcaattggctgcaccgtcagctcgacgcccaaggccagcatcagcttctggatcgtttcatagcgggtcttcgagccgcctttcaacgttttatacaggctctcccggttcaccccagcggcctcggccaccttgttcacaccttgggccttggcaatctcggcaagcgccttcatgagcacctgcaggtcttgagccttcatgctctgcgccagatacgcactgatggtttccgggctgtcgagaaagcgcgaagcctcatagacgctggttccggacgtatccagatcgaggatcggcatgtcctcgggtttgaatttcgattcgctcatttcatttacctctcagggcatcgagaatctcttttgcccgcttgatgcctcttttctggtcagtcttatcactgccccacagcatcaagtaagcggtgatccccgtacgcacgaaatacatcctgtaaccaggcccgacgaacacacgcatttcactcatgccgtcgcctaccgattcacaatccccaaaattgttttcctccgctcggtccaagcgggtcagcaccgccgttttcccccagatatcccgcataccgtcgagccatgtatcaaactccggcgtcctgccgattaaattagtcacagtatcacttgtagcctacaggctaccccttgtcgatgccaatggatttttgtttccggtgagcgccggaataaaaaaccctagttcagcacccgcacaaacatcggatggatactatgagtgcttgtttccccagtgtttaaagcacccgatcaaacaacggcgccacgtcataccgctgcttcaacatctgtgcatccaccaaaaaatccgccgtggcctgggcctcgctgacaattgtcggcgagatcggcagcaccttgatcgcatcgcgcttgaaccacaccttggcaatctccggtgccgactggttggccttggaccaggcttcggcgtattcatcgacgtgggtgttgctccagactcgggcgcgagtcaggcgggcaatgaagtctttgatgatcgcgcttttctgcgccagggccggctcgtacgccacgatgtaggtcggcgcactcatcaggcccttggcgttgcggatcagggtgctgccttctttttcctgcagtgacacgtagggttcccaggtgccgaaggcgtcgatgtcgccctgggtcagcgccaggctggcctcggccggcagcaggtatttgaagttgacgctgctgcgcggcacacccgcttcatccagcgccttgtacgccagttgctggctccatgagccgttccagatggcaacggtcttgcctttgaggtcggccaccgagtgaatgcccttgcgtgccacaatacccacgccgtcgaggctggtctgggtgctggcgacgactttcaccggtgcgccgttggcggccaggctgatcaccggggtgtcgccgacgatgcccacatccagcgcgccggtggccacggccgaggccaccggggagccggtgttgaagcgcttgaagtcgattttgtaaggcaagtccttcagctcgcccgacagctccagcacgatgcgattggagaagaactggtcacccacgacgagagtcaacggctcagcggcgctggccgacggaccatagagcgcaagagaggccacgcccagcaaggacagcagtgttcgacggttgatcatgaaaaatcccacagggttagagggttggtttaaccatctgtgggcatgcagtctggtcgcttgaggtagaagctaacgcaataaaagcgcggggtttaatactgttgggcactatcgatagaaccgtcccacaggtcgctagttgcttttcgtattaaaaccttcgccgcccctgggttagggtgacgtcaccagaccactggaccccagcacctgaaccactttcagcaaggtccattgcatgtcgattcccgctttgaatatctggggcgctccgcccactgcccgctacgaacaattggccgcgccgtttcgcccactgtttgcgcagattctcgcgcaggccgccgaggcggatcagacacgcgccagcctcgccacggtgatccagcaactgaatgccctgggtttgccacgctggcgcctgccggccagttatggcggccaggatgcgagcctggtcgagctgctcacgctgctcactgaactgtccgccgccgactccaacatcacccaggccctgcgcggccactttggtttttgcgaagacgtactcagcgccaaggacctcgactggcgcgccaagtggctggaccgcctcggccaaggcgccctgctctcccccggcagcaccgaagtcggcaacggagcccgtggcgacttcgacacccgcctgcaccgcgatgccgccggcgcattgcgcatcagcggcaagaagttctacaccaccggcgcgctctacagcgacctgatcaataccattgcaaccggtgaaaacggcaccgtgtatacggttgtcgtcgacctgaaagccccaggggtaaagatcgtcgacgactggaacggcttcggccaacgcctcaccgccagcggcacgtgcattttcgacaacgcaccggtggtggacgacgacgcgcgccccacccaacagcgctttggtcacgggcagtcgttcttccagctctaccacctcagcaccctcgccggtatcgcccgacgcgccgccctcagtggtgccgaagaactcagccagcgcgcccgcaccttcaccaccggcaatgccgacacggcgagccaggacgtgcagctgctacaggtgattggtgaagtcgcgagccaggcctacgccgcgcaagccatcgcccagcaagcggcccggcgcctggagtacaccgcgcagtatgtgattgcccacgaccagccactgcatgacgatgacccgcaggttgcattggccgagctggaagtgtgcctggcggtgaacccggtggtggatgcgacgctggccgcgaccacggccttgttcgatgccctgggcgccagcgccactgccagcagcaaggcgctggaccggctgtggcgcaatgcgcgcaccctggcgaaccacaacccgcgtgtgtacaagtcgcggatcgtaggcaattacctggtcaatggagtcctgccgcctgcgcagtggcgggtgggtgtggcaaaaagcactgacagttagagggcacaacaaagatcaaatgtgggagggggcttgcccccgattgcggacatccagtcactgcattgttagttgacccatcgccatcgggggcaagccccctcccacaggtaacctacacgctcacaaacttcagcacccgcgccaacatccggtcacaggcctgcaactgctccaggctgatgaactcatccggcttatgcccctgcgccatactccccggcccgcaaaccaccgtgggaataccggcctggtcgaacaacccgccttcggtaccaaaggccaccgtgccaaaatccggcgagccacagaactgcgccacccactctgcggcctggctttctggcgacgtggccagccccggataactggacaactcgctgaggctgatcgccgattgcgcactcactgcccgcatcgccggcaacaaggattgttcagcgtagtcgcgcagttgctgcaccacctgccagggatcctgggccggcagcgagcgcacttcaaagtcgaaactgcactcctgcggcacgatgttcaatgccttgccgccgctgatcaagccggtctgcaccgtagaaaacgccgggtcgaaacgcgcatccagatgctctggcgccttgagcgtttcgccgagccgcaccagctcgctgaccagccgcgccgcgtattcaatggcgttcacgcccgccggcgcgtacgccgaatggcacgccgcgccatgcacctggcagcgcatcgccagcttgcctttgtggccaagcaccggtttgagttcggtgggttcgccaatcacacacagcagcggcttgaccggctgcccgtggaaccgctcgatcagcgagcgcacgcccaggcagccgacttcctcatcgtaggacagcgcgatatgcaccggcatgcgcaacggcgcctgcaccaacgccggcacgcatgccagcacacaagcgatgtagcccttcatgtccgccgtgccacgcccgtacaacttgccgtcctgttccgtcagctcgaacggcgccacgctccaccgctgcccgtccaccggcaccacatcggtatgcccggacagcacgaagccgggcacctgcgccgggccgatggtcgcaagcaaattggccttgctcttgtgtgggttgtaaaccagttcacaggccacgccgtggtcttgcaggtaagtgcgcacgaagtcgatcaaggccaggttggattcgcggctggtggtgtcgaaacgtaccagttgcgccagcaggtcgcggctgttcatcggtcatctcccggcaccgcataacccggtgcgatctgcgggttgagggcgcggtcgatgtaatcctgcagttgcccgcgataggcttgccagagttggtcgagggcgcggatcgggtccatatcggcccaatccacgcgcagattgaccaccggccacagcaggtcatcgacgatcaccagcgccgccgaatgcaccggccccgcttcaccaccgcctgtcacaccggcgtgcatcgcggccagcagccggtcggccaggtgccccggggccgcttcgaacgccgccaccatggcctcgatcacccctgcgtgggccaacatgttgcctgccgccacgcagccctcaccgctcactgcgtggtgaatgcccagggtctgcgcaccgctgaaatgcgcggtgcggcccaggtgatcaatcacgctgacctggcgatactcgctgtgatcctgaccggccagggtcgccagtgcttcactcggcgccaggccctgctccaataagtccagcacctgtggccccaggcttggcaaggtgatgttctgcgacgccaccgcgcccacaccggggcgcagccaggggcaacgcgcacccacggcaatgctcgatgagctgatcgcaatgcccaactggcccgtctcggcgcagcgggcgacaacggaaaacgtcatggggtgtcctcagtcgagcacggaagggtccgcggcgatcatcaactgcttcatttcttcgaaatgctggcgcgaaaagtcggcgatgccttcccagccgcgcgcggttttttccgccacgtcatcggacagcactcgcaacggctgcccggtggaccaggccgtgacgaggatctggcaggaacgttccagggtccagatgtcgtcgaaggcttcaccgatggagccagccgtgaccatcacaccgtggttgcccatcaacaagcgcgtcttgccgtcgagcagcccggccaggcgcgcgccttcggcctcggtgtcggccatgccgccgtacagctcgtccacggccacgcggttgaagtagcgcgcagtgttctggtcgatcggcgggatgtgcggcctggccaggcacgccaccgccgtggtgtacaccgggtgcaggtgcagcaccgcacgggtctgcggcagcagccggtggatctgcccgtggatcgaccacgccgtggcatccacgttgggatgatcggcacaggcggtgtcgtctgcgttcagcagcagcagatcgctcgcgcggatacgtgaaaagtgcttccacttcgggttgagcaaaaactgtttgccatcggccgagacggcggcgctgaagtggttggccaccgcctcatgcatgcccaggtgggcgatgatgcgaaaggtcgccgccaggtcgatgcgcgtctgttcttcgtgggataacgccatggatcggactccgcagggcgcggccgcaggcgaatgcggcacgcgcgtgtaggtttacttcggcatcaatgcggcaatgtcggcatcggtcggcgcctggaagttgtacttcttgagcagggcggcgtactccggcgtggcgcggtatttgtccaggccgtcgagcagggcttttttcaccgtgtcattgcctttcttcacaccgaagccgttgagcaccgggtagatcaaggtgtcggacgagatcaccacgcggctgccgagcttgtcgatcacgccccgggccacggcggcgtcggtgatctgtgcttcaaccgcgtgggccagcagcgcctgggtggtttgcgggtcggtgctgtattcgctgatctggatcggcttcaggcccttggccacgcagtattcggtggacagcttgttcatctgcgccagccacgaggtggcgcccatggagccgatcttgtggccgcagaactcctccggggtcttgggctggaagctgctgtccttgagggtcaggatcgactcgccgctcttgaggtaagggatcatgtcgatgactttgacccgctcggcggtgatgtacatcgacgaattggtcacgtcgaaacgcccggcttgcaggccggtgatcaggttgggaaagcgcgtatcgagggtctcgaccttgcggcccatgaccttgcccaggccgtccatgaattcgatatcaaagcctgccggcttgttgttatccatgtactcatacgggaagaacgtcacatcggaaccggcgatgatcttgccgtcctgctggaacgccgaagcggccagcgaggtcagtgcaaccgctgcgcccagcaggcacacggcaaggggacgaacacttttacgaaacgctgtcatggtgattacctgcaagggtttggggggttaggcagtggctgaatcttgtcccgcctgttgaacgaagaacgacgcgccacggggtttctgcggcaagcgcatgtggttgtgggtggaacgcaccaggccactttcttcaccggccaccagcaggccggcatgtgcgctgggcaacgggttttcgccgaagggcagcgcgtcttcagcggcatagacactgatgaacagcgtgcgcggcagttcggtctcgttagggctggaagcatgcagcagccgggtgtgcatgaagcacaccgagccggccgggccgtaacaggccaccggctgctggcagtgttgcgcgaccacgctgtcgtccaccgagccggtgaaacgctggttctgccagtgcgaccacagcgggcctttgtggctgccggggatcacgttcagcgggccgttctgcggcgtcacttcgctgaccatcagcaaggcggtgacgatgtcgtcgttgctgtggggcgtaaacaggaagtcctggtgccacttcacctgggtcgcggtgtggggcagtttggagttgatcttgctgtggtgaaaacgcgtgccctgggcgccgatcagttgcgcggaaatcgccgccatgcgcgagtgcaacgccacgcgctcatacgccggcgaaatctccgtgggcgagctgacccggcgcagcgacgggtggtcggcgcggtggtcaccctccaggtcaaagcgctcacggccatcgacggtggcgccccagccccggtcatgactgcggctttcttccacccattggtcgaagtcatgctgcagcgcggccacttcatccagtgacagcacgccttctaccaccaggaagccgtcgcgctggaattgttcgacttgcgattgctcgatcattttagtgtttcctgaacgttaaacagatcacgccagcgagacgtccttgaggaacgcctccacgcgtgggttgtggccgctgcgcagggcgcccggcgtgtcgtcgcagaccacgcggcccttctccatgaacacgatgcggtcggagaccttgaaggcgaagttcatctcgtgggtgacgatgaccatggtgatgccctcctcggccagggcttcgatcacctgcagcacctcgttgaccttctccgggtccagcgccgaggtgggctcgtcgaacagcatgatctgcgggcgcatcatcagcgcgcgggcgatggccacgcgttgctgttggccgccggaaagctggtgcgggtacttccaggcgtggtcgagcatgccgaccttgtgcagcagcgcgtaggcctgttgcttgagctcggcggtcgcgcccaggcggtggtatttgggcgccatcagcaagttgtcgagcacgctcaagtgcgggaataggttgaagctctggaacaccatgccgatgtgcaggcgatgctcggcgtgttcgacgtactggggtttctgcgcgccgactttgttcaagtgaatgaagggctggccgttgatcctgatctcgccgttatccagttgttccaggccgttgagcaggcgaatcagtgtggtcttgccggagcccgacgggccgatcaccgacaccacttcaccgggctggatctgcagattcaccgagcccaacacctcgatatcgttgtaggccttgtgcaagcgcgtggcctgcaacgccgactcgccattattggccgggcgcgccaaggcggtgcgctgttgggtcgccagggccaacaccgccgcatcgggcatgcgggacacgttgcgctggttgacgtcgagaaagcgctccaggcgtttgagcaggaagtcgaacaccgtgacgataaacacgtagaagaacgccaccgccgccatggtttcgatcaccaggaagttctgcgaatacaggcgctggccgaccatcaggatctcggtcagggagatcaccgacaccaacgaggtgagcttgacgatagagatgtactcgttggccagcgacggcaaggccacccgcagcgcctggggaatcactacgcgccactgggtgccgaagaacttcaggccaagcgcccgcgccgcctcgccctggcccttgggaatcgacagcaggccaccgcgatggatctcggccacataggcggtttcgcagatcaccagcgccaacaggccggaccagaacgggtcggccagcaccgccgaggtgcccggcaacgcttgcggcaggttgtagataaagatcagcagcaccagcaacggcaggctgcggaacagccagatatagccgcgagccggcacgctgagcagaccatgtcgggattgcttggccagcgccagcagaaagcccaggccaatgctcaacacccaggtcagggtactgagtttgatgaccgtccacgtcgcgcgccagaactcggcatcgcccagcaaaccaaacatgtaattccagtcgaatgtcatcgtcgctgtgccctgagaagttgatctacatcgatgggttcagagtcgtggcgggaggcggttggggtcaattcgtaaaagccggggcactgggtaggcagaacctatgcagtctgaaagcaaccaaaatccaatgtgggagggagccccctcccaccattggtgcaggcttgaatcggccgtattgcgcacgccacttattggtgcaacctcagctcacaccgctcaacacccgcacggcatgcggatcaaaaaagcttggcggcgccatgccggggatgtactggtcggacacaaacatgcggcagcgctcggcaaacgccgacaccacccgcgacaactgggtgttgctggccgtggcgtagcccaggcgcatcggccggtgcgcacccgccaggcgcaggcggatgacgcgcttgccgtcctgggacatattcgatttgggccgcgcattcgcgaaggaatagccgatgccattgcccaccatggcgcgcaccgtttcaaggttggtggagcgcatgatgatgttcggcgtggtgccggcctggatgaacaggctgaggaaatagtcacgactccacggcgtgtcgagcagcaccaccgggtaggcctccaggtcctgcatgctcacggccggcgagttcgccagcgggtggtactcgcccaccatcacgtagggcggcagttgcgccaggggttggaagtcgatgtccgggctggtcaccaggtcgtaggtcagggcgatatccagctcgccgctgcgcagtttttccagcagctcttcatggttgccctcggcttgcgtcagccgtacgccgggaaacgcacggccgaaaccgaacaccagctctggcgtgatcatcggcgccagcgactccaggcagcccacgcgcagcggcccgcgcaccgtgttcaaggactccgaggcgatggtgtagaggttggtcatctgttccaggatcagcttggcttcctgcatcaccaggcgccccaccgccgtgagggaaatgccctgggcgtgatggcggataaacagctggatgcccagctccgcctccatatgggtgatcgccgccgagatcgacggcgacgacacgtgaatgcgctcagcggccgcactgatgctgcccgcctctcccgacgcgacgaaatactccagttgacgctgagtaatacgactgagcatgacgcctgcccctcaacaatgactgtgcaggtggtgttgcagggttcgtgccgggtcaggcgcaaaccgatgacctgcatgggcttcggtttttcctaagcactaccccgcgcaaatgctggtttcgccgcaaccggggcggtgtgaagctggatctatcccgcttcccacgagctgccgttatgccgacccacacccgtattcgcatgttcaatacccgacagacctaccccaaccaggcgctggacaacgacctgtgccaggccgtgcgcgccggcaacaccatttacgtgcgcggccagatcggcaccgatttcgacggcaacctggtcggcctcggcgacccgcgcgcccaggccgagcaggcgatgaagaacgtcaagcaactgctggaagaagcaggttcggatttgtcgcatatcgtgaagaccaccacctatctgatcgacccgcgctaccgcgagccggtgtaccaggaggtgggcaagtggctcaaaggtgtgttcccgatttccaccggcttggtcatctccgggctgggccagccggagtggttgatggagatcgatgtgatcgccgtggtgccggacgattgggccgtatgaacacgctgattgcctggagtgccccatgacccatcgtgtgtttttcctcaacgggcccaacgccaacctgtatgggctggataaaaacggcacctatggcagcgaaagcttcgccagcatcgacgcccgctgccaacgccacgccgccgcgctgggcctgaggctggactttcgccagagcaaccatgaaggcgtgctggtggactggattcaggaagcacgcctgcaggccgacgccatcgtgatcaatgccgccgggctcagctacagctcggtgccgatcctcgatgcgctgctggcgttcgacggcccgatcatcgaagcgcacatgagcaatatctggcagcgtgaaagcttccggcaccactcctacgtgtccagggccgccaccggtgtgatcgccgggttgggggcgctgggttaccaactggcaatcacggctgtggccgaattgctaggccaaaccgcctaatgactgttcaggaaccgcctatgtccgtcgaaaaaatcaacaccctggtcgtcggcgcaggccaggccggcgtcgccatgagcgagcacctgtccctgatgggcgtgccccaccttgtgctggaacgccaccgcatcgccgaacgctggcgctcggaacgctgggactcactggtcgccaacggtccggcctggcatgaccgctttcccggtctcaccttcgaaggcatttcgccggaagccttcccgccgaaagagcgcatggccgactacttcgaggcctacgcggataagttgcaggcccctgtccgcacgggcgtggaagtccagtcggtggaacgccatgcagggcgccccggcttcaaggtcaccacctccgcgggtgtgatcgaagccgtcaacgtggtggccgccaccggcccgttccagcgtccctcaatcccgaacatcgtccccgccagcgcagcgctgcaccaactgcattcctctgcctacaagaaccccggccaactgcccgaaggcgccgtgctggtagtcggcgccggtgcctccggctcgcagatcgccgaagaactgcaaaaggccggcaagaccgtgtacctctcggtgggcgaacactaccgcccgccccgcgcctatcgtggccgtgactattgctggtggctgggagcactgggcttgtgggatgaagtcaaaatccagccgaagaaaaaacacgtggcgtttgcggtgagtggctatgaaggcggcaagacggtggactttcgccgactggcccaccaggggattcagttggtgggtgtcacccaggactgggtggagggcgtcatgacgtttcaaccggggttggccgagaacgtggctgaaggcgaccgcgcttactttgacgtactgcgcgatgcggatgcgtatatcgaggccaatggcttgccgtttccgccggagccacaggcctgggaattgttgcccgatccagagtgtttggtgaatccgatgttgaacctggacctggctgaagcgggcgtgaccacgatcctttgggccactggcttcactttcgatttcagctggttgaaggtggacgcgttcgacgaaaaaggcgaaccgttccacaagcgcgggatctcggcgcaaagcgggatttacttcctgggtttgccgaacctggtcaaccgcgcatcgtcgtttatctatggggtttggcacgatgcgaagtacgtggcggaccatatcgtgttgcagaacgcgtacatggcgtacgacaagtcctaagacgctcagggcaggtcgaccgcaccttgccccgttgcctacagttgcgtcagaatccgccggcttgtgcgcttgggtgggtgtctctaacgtggctcggtcgctgaacactcagtgatcgggtttagtagcccgagtgacaacataaagtgcatgagcctcatcgatcagatgttcttgtctgtgcttgatggtggctgtgcgcagggcgccctcgggcgcgccggctttgtgtgtttccccggtctactaacctgcgtacagctgccaccctctcgtttagtagcgaaaaggtggtggccctaaaacaggtacaacacacatgttcaaagtcacacccaaccctccaaacagtctggacctgaaactgaatcaggcggcgcaccgtgcaattgatcactacctcaacaccggcgccgaaccgccagagccacctccaccgccatcgacaacgctgttcagcatcgccaacgacgccagcaacgagaccttgatcgtcaacagctacgaaaccttttcctcggtgagcgccttgctgctcgacctgtcggaggcgttgacggggaaacagcgggatgtggcgctggccattcaccagttgagtgagttgggggttttgttggtggataagctgatggagcgcgaagctgatcaaggtctttgagaaaccggccatctccggctgataccgccccataagggcgaacactgcaactgtggcgagcgggcttgccccgcgttgggnnnnnnnnnnnnnnnnnnnnnnnnnnnnnnnnnnnnnnnnnnnnnnnnnnnnnnnnnnnnnnnnnnnnnnnnnnncccaacgcggggcaagcccgctcgccacagggtacttatcgccagttttacctaaaggccttgcgtgctttcagccacgcttgggtagcttccaattcggccgaataaagtggcaggtatagccattgggaatccgctccagataatcctgatgctccggctccgcctcccaaaacggccccgccggctcaatctcggtcacaacacggcctggccacaatttcgatgcatccacgtccgccgccgtgtcctcggccacagcgcgctgctgctcgttcaggtaataaatcgccgagcgataactcggccccaggtcattgccctgccggttaggcgtgctcgggtcatggatctggaaaaagaactccagaatctgccggtagctgatcaccgccgggtcgaacacgatttcaatcgcttcggcatggttgccatggttgcggtaggtggcattcggcacgtcgccgccggtgtagccgacgcgggtgtgcagcacgccggggtagcggcgcaacaggtcctgcatgccccagaagcaaccgccggcgaggatggcggtttcggttggtttggtcatggtctgcccttgcgttcagtggatacccgcctagttatggggccgtgttggccaatagcaagattcacggtttgttacgcagtgcgccagcacctcagggtttgaagtttttcatcagtttgaacaggtggccgggccagatccagcgtgactggggcgggtcgcgagtctcatcgagagcgtccagaaaggttttgttgggcacatcaccgtcaggtccattcacgtttggacgcgggagagttggatcgtttggcgggtcctccggcttatagacccgatgggtggctgcatccagcacgtaaccggcggccttgccgtactcagtgaggctccagacaccgtcgatgacttgggagactgcctttgagggtggaagcttgatgtccttgtgcgtggtggtgacgatatggtctgcagttttggcgtgtttgaaggtggcgtactcgctgccgagtggaggttgatccgcgccctcgtcggagaattttttcaccatacgttccaggaacggtatgccgccgatgtgggtgaacgcgcccatgcccgggttcaggatgtgtttcacaaagccagggtcaacacgggtgctgctgagcgctgaactggtgagtatgcgtgaggcgatggcctcgtcctctggcttgtaattgaacgtcgtccaatacccgtctacgtaaaagccattggtggctatgtattggcgaccgtcgctggagcgtcgatactcgccgagtgcccagaccaaaagatcaacgtggcctaaatccgcaccttctgactgtagatatgcatacatatccgcgaccaaggcacgatcatcgaggttgaggaagtcgcttgctctttgaagggcattcactgaagtggccggtggaaggccgacggggggttctctaccgccaaacacgcgcgaaatcatgatctcacggccgacactggcagcctgccccgaactagaaccgcctgaaggctccatcgacttggccgtttgccacgccacccttcgctcattgaccgtgaaggcgccgccgttgtcgcgggcgatcaggttgagttgatctcgcccgagtcccttgaaggggttgctgtcatgaccgttgaggaaaccggtcgcttgtcgcgcacgggccaggagttccgggttattggccgttggaagctctgcgtcgtgttgtgccttgttggcgaaatactgttcgtcggtgatgggttcgagggggttggcgttcttttggcccgtgggcgcctccgcacgctgtgccgcatcactcaattgacgcgccaggattgagacggtcgtggtgccgttattacttgaagcaatgggcgcatcacgttcaccgccatcaagcgagatagcggacggagtagcaccgctgacggaatcgcttgtcacgcgactgttggacgatggcgtataaggactgatagtgaccatttgtcttcacctagcctctattaatccgcctgactcacggacatggaatgcagtgcgccggcacctcagggtttgaagtttttcatcagtttgaacaggtggccgggccagacccagcgcgactggggcgggttgcgggtgtcggcgagggcatccagaaaggtgttgttggaagcatcaccgtcaggcccgttcacgtttgaaaccgggtgagttgaaacgctgcgtggttcctctggcttatagacacgccggttagccgcatccagtacatagccggtggccttgccgtattcggtgaggttccataccccgttgacgacttcgaagagggcctcggaggggggaagttttatgtccttgtgcgtggtggtgacgatatggtccgccgccttggcgtagttgaaggtggcgtactcactgccgagggggggttgatccgcaccttcactggagaattttttcaccatacgctccaggaacggtatgccgccaaagtgggagtacaccccgatgcccggatccaggatgtgcttcacaaaaccctggtcaacacggctgttgccgagcgctgaactggacagtatccgtgaagcgatggcggcgtcctccggcttgaaatcgaacgtcgtccaatactcatcgacgtaatagccattattgctaatgagttggcgaccgtcgctgaaataacgatagtcagcgagtgcataaaccaatcggtcgacgtgacgtagatccgcaccttctgaatgtgcataagcgtacatatccgagatcaaggcacggtcatcgagggtgagaaagtcgttgcgattttgagtgccgttttcaaaggtcgcgggtggaagggcaacgggtggttcgtcattgtgaaacatgcgcgaaatgaagatctcacgaccgttaatggggaccagcgtgggattagaagcgcctgaaggcgccatcgactggacagtttcccacgccacccttcgctcgttaaccgtgaaggcgccgccgttgtcgcgggcgatcaggttgagttgatctcgccctagtcccttgaaggggttgctgtcatgaccgctgaggaaaccggtcgcttgtcgcgcacgggccaggagttctgggtcattggccgttggagtctctgcgtcgtgttgtgccttgttggcgaaatactgttcgtcggtgatgggttctagggagtcggcgttcttttggccaacgggtgtctccgcccgctgtgccgcatcactcagttgacgcgccaggattgagacggtggtggtgccggcattacgtgtagagaggggggcatcagcctgggcgttgtcaggcgagactgttgacggaataacaatgccgccggattcattcgtcacgcgactgttagacgaggaggtattagggctgatagtgatcattagtattcaccttgcgtagggcatgtgaatggtcatgtaaaagtttcttgcctatccaaatacccgcagccaaattcgctgcgggcatcacaccacacactaatagctatatttaattgtcacagcatcaacgccggcaggacgagcgtaaggtggagcgccacccaataccgtatgaaaaatcgtaacttttgaaccatgaccgaagggctggctattaaaatccatcagcacacccgaagaactcggaaagatatcacgacaatctttttcggcactgaaggagcgaaagtaacacagctcaaccttctcactgagtgtcccaggatagtatgttgtactccaccgaacttctgatatctgcttgggatactggagtgttcctgatggaatatccgcagccagcacactaaagtttgcgaattcacgacttggcacagtattagaattagacaaaaccaatacgggagttggcgccaccgttttagtaaaaacgccctccgccgccaacaccacatcctttgtaaaaaccgccaacacaacacacacaacaagccaaactttactaatgcttttcgagctcttcataatcttcaccctagttcataagtgagcacctgaggttccaatcattccagcagtaggaatcacaccactacccttgcacgatttttcaattcaagtaaggcacccgcttcctaaaaacatgaagcccttatctgtaatacttacaagtaggactttgtcagtaacttcctagtcccgtctcccctctattaaaaacccctgctccaaggcatgatgccgccctcacatcaaggacgataaaaccgtgaaaaccaccctcaccgcgctgctgttgattggcttggcgatgcctgcattcgccgataccaagcccatcggcttcaagaacatcaacgtccctgatgcacaacgcccgctgcaaatggtcgtctggtaccccgccgccaccgcagctacgcctgagttgatccgcgatgacgccgtgtttttcggtgccttggcagtgcccgatgcgccggcagcgagcggcgaacatccgttggtggtgctttcccacggctacggcggcaactggggcaaccaggtgtggctggccagcgccctggcccatcaggggtatatcgtggcggcggtcaaccatcccggcaccaccagcaaggatcgcagcccccaggccgctgcgcagttgtggcaacggcccaaagacctgagccgggccatcgatgcggtgatcgcccagccgacgcagttcggcaccgtggcaaacaaccggatcgccgtggtcggccactccatcggtggctggaccgccatggaaatcgccggcgcgcgtttcgacccggacctcttcgcccgcgattgcaatactcatcccaaattgggcggctgcatcggctaccagcagatcaagcccgccgcgaccccggcggcgaaggcccaactggccgcactgccggtgccggcgctggtgattgcggggggcgtgccaacggaagatatggaccccaacctggagtccgccgacatggtcaggcgcatgcccaaagcctcgacccagtacgtggaaatcctcgatgccacgcacttcagcttcatgtcgatctgcaagccgggtggcatggcgttgatcgaagaagactcgccgggcgatggcatgatttgccgcgatggcgagggggctcggccaagggcggtgattcagcaacaggtgctggatctgatcaccggttttttggggcggacagcggcacggcgcacggcggccgatttttagctggtatcatcccgggcctgtacaacccgggtagaaccacatgaaccgccagaaaaaactccagcagctcttcaaggaaaaagccaggaaggccaacgccaagttggcgccgaagaagaaggacaagtacatcagcaaggcagaccgggaaaagctcgcggccgaagccgctctggacccaagcctttccccggaaagctgactcagcaaccgctcaacgcgacctgccgccgctcgcccgcaaagaaaaatggccgcagccgcacgcccacgctgttgccgataaacgccgccaccagccacacccagccatgcaggctgcccgaggcgatgccactgaagtacgcgccgatgttgcagccgtacgccaggcgcgagccgtagccgagcagcaggccaccgatcaccgccgccaccagcgagcgcgccggaatcttcaggctgggggcgaaacgcccggccaggccggcggccagcagcgcaccgaggacgatgccgatgtccatcacgctggtgatgtcttcccacaccggcgcggccagggctttggcgttgcccggcatctgccagaacgcccaactggccacgtccacccccaggccgctggcgactttagcgccccacagcgcgaatgcagaggtgatgccccagggccgtcccgccaacgccagggtggcgtagttgagcagggccaggccgatggcgccccacaccaatggccatggcccacgcaggaagcggcgcacgccttggtgttcgcttttcacgccctcttccaactgaccatgacggcccttctccagccgtacggtcaccagcgcgatgatcgcgaacaccaccaggctcaagcccaatgccggcaccacgccgaagctcttgacgatggacaccgccgggaacgccggcagcgcaaaccaccagtcaacatggtgcgtggcgatcaacgaaccacagataaagaacagcaaggtgaccagcatgcgcgcattaccgccgcccacggtgaacagcgtgcccgatgcacaaccgccgcccagctgcatgccaatgccgaagataaatgccccgaacaccaccgacactccggccggcgccaccagcccggtcaccggctgcccgaacagcgtgcccgcccccaacgccgggaagaacagcagcaccgccagcgccagcatcaccatctgcgcgcgcaagccggcgccacgccgatcattgatgaacacgcgccaggccgaggtgaagccgaaggcggcgtggtagagggtcaagcccagtgcggcgccgaccaccagcaacagcacctggcgcgagccaacgctgttttgcaagaacagggcgcccagcaccaggatgataaaggccaccagcggcgcgacgggcttgcgcgcgggggtaagaggcagtgaggtactcatggggaatctcggtctgtttgaatggagtaggctgcgagggtggcgagtataaccttgtgtgtagataatcctgggaggcgtgtggcctgacggcgcccctttcctccatcagccggtgaccccgtggccaaagacatcgagaacccttgcgtttccctctgccagctcagcggcgacctgtgtgtcagttgcggacgcaccaaggatgacatccgcaagtggaaacgcatgaaacgcccggagaagatggccgccgtacagcgtgcgacacagcgcctcaaggctttgaagaaagccaggtgaggccgttcatgcatctgtggtgagagcgcgtctgtggtgagcgggcttgccccgcgttggagtgcgcagcgctcctttttttttggggccgctacgcagcccaacgcggggcaagcccgctcgccacaaaataagcccgctcaccacagaggcccgctcaccacaattggcccgcaagatcgcggatcaaccccgccccaccgaccccgacaccggaagatcccccagcaacttgagcccggtgctcttcacaaacgtcgcgtagtccatcggtttctggatacgcgtctcggcattgggtagcacataggcccaggcacgtttgctggaggcgtcgtacaccagcttgaacaaccgcgtcggcacccataccttgttatcgccgatggtgccgtagcccgggtcgaacagcgggcctgtgaacacatacacatcgccgccggcgcgcacggcaaacttacgcacgtcggcctcgaccttgctccagatcttgcggttgttggtggggtcctggggcaccatgttcgacagcgcgaacgactgcgccatggcattggcattcggtgcatcggcggccggggattgatgcccacggtccaccgccgggtgctgggcgcggtagtcgctcaactcggcgcgaccggctttggggatacgcggatcggcatagaactggttggtgcgttcctcgcccttggcgtctttcagcaaggcggcattcaggcgttcgaccaccaccagcggggtcttgctggtttgcgagtagagcaccgcaaaatggtcggaacacagtgccaggggtttcatcgcggccggcaccgtggcggggttgatcggtgcggcggggaacaggtcggcacagctgtcgaaggacagttgtttttcctgtttggagtagaggtccggcaggctgcgggcgttggccccacaagacagcaaaacaaaggcggtcagcccaacggcaattttgcgtaggtacatgcattaaatcttcgaaaaggagtgaagcggctggctccggcgtgcggagccaagtggatgatattgcgaggattattgactagcagatgtgagattagtgcccgaccgctgtaggttttcccgcagcccgcgcgcctggtttgaaaccatgggcatgggcgccccaggcaatcgccagcgacacgccgatcaacagcagcatcgcccacggaaacgaagccacgccccaggtctccagcagcaccccaccgaccacgccgctgccggcaatcgcgctgttccaggccaccacattcagtgacagcgccacgtcggcgccatcgcccgccgcatcggccagggcggtttgcagcagggtcgcggcgccaccgaaactcaggccccacaccgctacaccgatatagaccacttccggccggttgccgaaaaggcccagccccagcgcgacgatcgcgaacaccgccaggctgacgagtacggtcttgcgcaataacggctcaacgagcctggccgtgagccagatccccgccaacgcggccaccccgaacaccaacaacaccaggtcaacccgctctgccaaccccgcaggcgccacgaacggtgcgatgtaggtgtacagaatgttgtgcgccagcatccaactgatcaccaccgccagcaccggccgtacgcccggcgtggtcagcacctggcccagtgacacacgttgatgggcgggctggggcgcatagtccgggactttcaccagcacccacgcaatcaacaccagactcactgccgacatcaggccaaacgtggtgcgccatcccaccaacccacccagccaggtgccgagcggtacacccaatgacagcgcaatcggcgtacccaccatcgccaacgccaacgccctgccctgctgatgcggcgcgaccatgcgccgggcgtaaccagccagcaagctccaggccagaccggccgctacgccggcgaagaaacgcgctaccagggtcacgccatagtgggacgacagcgcggtgatggagttgaacagcagaaagccgacgatggtcagcaacaacacattgcgccggcgccagccacgggtcgcgatggtcatggggatcactgccagcaccgagcccaaggcatacgcggtgaccatctgcccggccatcgacggggatatcgccaggccgtcgctgatcagcggcaacaggccggcgggcagggtttcggtaacgatgcagatgaagccggtcatggccagggcgagcaaggcgccgatgggcaggcggtcggatgacgccgataaagtgagtgagggtgtcacggagaactccttgagcgagacttaaatactgatcgatacaaatgttgcggccgagcacggctcgttgtcaacgacttatgtatcgactagtatttatctcgcttccccaccggagatccgccatggcacagatgggccgcccccgcactttcgaccgcgaccacgccgtagaccaggccctgcacttgttctggcagcatggctacgacgccacctccctggcccatctcaaggctggcctgggcggcggtatctccgcgccgagtttttatgccgcgttcggttccaaagaagccttgttcgacgaatgcgtgcagcgttacctggcgacctacgcccaggtcaccgaatgcctgtgggatgaaagcctgtcaccgcgtcaggcggttgaaacggcgctgcgccgatcggcacgcatgcagtgtgaagacgggcaccccaagggctgcatggtggcactgggtgtgatgagtgcaccgagcccggagaatgcgcgggtggcgaatgggttgacgcaatcacggctgcgcacccgcgcgggaattgtggcctgtgtggagcgcgcaatacgtgccgggcaattgccaggcacgattgacccggcggtgatggcgacggtattcgacagtttcctgcaaggcgtttcgatccttgcgcgcgacaacgtgccccacgccagcattgacgcggcgatcagccaactgctgctgacctgggacattgccgcgtctacgacaccgcccattcgtcccgacactgcatcaggaaatccacaaacgcccgcacccgatgcggcatatagcgcccatggggatacagcagggtaaacggtcgtgaacgcccgccaaacggctgcaggacttccaccaggctgccgtcagccagttcctgctcgacgataaacctgtaggtctggaacaaccccgccccatgcctggccagggtcaccccgcccagcacatcatcggagcagctgtaccccgcctcccccgcatactcctgcgccttgccgtccacctggaacagccaggcgatgcgccggccattgctgggcagttcgtactggatgcattcatgggtgggcaggtcttccagcgtctgtgggatgccggcgcgtttcagataggacggtgccgcgaccaccaccaattcggcgtcttccagcaggcgcgcaatcagcgatgagtctggctgggcgcgcacacggaccgccaggtcgtagccttcggcgacgaagtcgatgttgcgattgctgatgtggatatccaccgtcacctgcgggtacaacgcacgaaacctgggcagcagcggcagcagacgatgatgggcgtaggtggtgggaatgctgatgcgcaacaggcccgatggcacggcttgcgcgcccatcacttcctgctgggcttccaccagctgggtcagggcctggcggcattgctcgaagaaagtccggccgctgtcggtgaggcggatgctgcgcgtggtgcgcacaaacagccgcgcgcccaagcgctcttccaggcgggaaatgctgcggctcacggccgccggcgtgacaccggcaacctgcgcggcggcggtgaagctgttggcctcggcggcgaggcagaatagttcgatactgcccagctgcacatcttcgaaatggcgcttcatggtcgctccctaaaacaacagccgcgagaaattgcagcacgcctgtgccagttgcgctacctcttgattcagcccgtattggcggtccacccggtgcaacgccacatactggatatccggcagcgccggctgggtcaccagcgcacgcagggtgccttgctcgatcaggtgggacaggcaggccacgggcaggtagctcacgccgatccccgacaacgccaacccggcctgcaccaacaggttgtggctggtgagggtgcgcggcatctgcacatggttggccgccagccagcgctcgtagatcatcccggtccccgactgtgaaccttgggtgagcacggtgtagctggccagagtctccaggctgatggggtcggcatccgggatcaggtcaggggcgcacatccaggcgttttccacgcattgcagcggcgtactgtgaaaacgcgggtcgctgtagacgtcaggcacgatgaccaaatccaactggtcgctttccagtttgcggaacagctcgctgctgagctccaccgacggttcgatctgcaccttggggtacatctgacgcagcgcttcgaccaacgccggcagccaagtgagtgcggtgagttcggtgacgcccaggcgaaaccggcgcaccagcacatcacgggcactgacccgttccagcaattggtcgcggctgttgagcaggtcacgcgcgtagtccagcagctcgccccccttctccgtcagccgggcgttacgtttgctgcggtcgaaaatctccacgccgaaggtgtcttccaactcctggatacgcttggagatggccgactgcgacatgttcaacttgttggccgctgcttcgaagctgcccagttcggcgatccagtacagcgcatcgatttgcttgaacgtgatcatggcaggctaatcatgagaaaaagcgatgctaacacatcataaaatatcgctaaaactctccgatcatcgctcataagatctggccatagcccgtcgctatccaacgattctggagatttgccatgtccttgcccggttcacgcatccttcccaacgcccccatggcctcggccgaactggtcgaggcgttcgcccaagtggtcaccccgcacatcagcgacaacctgggccggcacatcggcgcacgcggcctgacgcgctacaaccgcagcggcaaactggtgggcacggcgatcacggtgaagacccgtcccggcgacaacctgctgatctacaaggccctgagcctgctgcaacccggccatgtgttggtggtggacggccagggcgataccaacaatgcggtgatcggcgagttggtcaagctctacgcccagcaacgcggctgcgtggggtttgtgatcgacggcgcgatccgtgatgtcgccagcttcgacgacacgccttgctacgcccgcgctgtggtgcacaccgggccctacaagaccggccccggtgaagtgaacgtgcccgtgtccatcggcggtatgctggtcaaccccggtgacctagtggtgggtgatgaagacggcctggtcgcgttctcccaggccgacgccgccgaagtgctgcgccgcgccgcgcaacatgccgaccatgaagaggccgtcaaagcagagatcgccagcggtgccgtgcgccagagctggatcgacaaggtactggacaacgcagggctggcgtcatgaggcactggttgtctgatcgcgtcctgggcatcgcgccctcccccagcatcgccgccaacgcactggtcaccgagttgcgcgcccagggccgcgatatcgtcaacttcaccgtcggcgagccggacttcgacaccccggcgcatatccttgcagcggccagccaggcgatgcacagcggcgacacccactacacgcccaccaccggcaccctcgccctgcgccaggccatctgcctcaagctgcaacgggacaacgacctggcctacggcctggatgaagtggtggccggttgcggcggcaagcacatcatctatcacgcactggccgccacgctgaaccggggtgatgaagtcatcgtgcacacaccctattgggtgtcgtacccggacatcgcacggctcaacgatgcaacaccggtgatcatccccggtgatgaaagcctgggtttcaagctgtcgcccgacgccttggaccaggcgattaccccgcagaccaaatgggtgatcctcaacagcccgaacaaccccagcggcgcggtctacagtgaggccgagctgctggcgctggcccacgtgctgcggcgttatccacacgtgctggtcatggccgacgaaatctatgagcacttcgtctacggtgaagcccggcacgtgccgctgacgcgcctggcgcccgacctcaagtcgcgcacgctgatcgtcaacggggcctcaaaaggctacgccatgaccggctggcgcctggggtttggcgcaggtcccgcctggctgattgcagcgatcgccaagctgctgtcgcaaaccaccacctgccccagctcgttgagccaggcggctgctgtcgccgcgtttgccggagaccaggcacccatcgccgccatgcgcgaggaataccagcaacgccgcacacgcatgttggctttgctcgcggacatccccggtttgagctgtaccccaccagacggcgcgttctacgtgttcgccaatgtgagcgggctgatgggcaaagtcacaccgcaaggcggtcgcctcgacagcgacagccaactggtggactacctgctgcgtgactacggcctggccacagtcagcggtgcggcgtacggcatgtcgccctatgtacgcctgtccttcgcaagctcgctagaagtgatcgaagaaggttgccgacgtctcaaggacgcgtgccacgacctgcgctgacccgccctgctgcacccggcggccaacggacggccgctgttttgactgcctagaacaacaacttaaaaatcattgatcgcaaatgaggcattcccatgcacacgccccgtatcgcgctggtctggcaaatcatgatcggcttgctggccggcatcgccattggtgccctgttgcaccgctttcccgaatcccggccgtggctggtggacaatctcctgcaaccggcgggcgatatttttatcaagctgatgaaaatgatcgtggtgcccatcgtgtttgcctgcatggtggtgggcattgccgggcacggcgacggtaaatccctgggccgtatcggggtacgttccctaggctatttcttttgcatcactaccctggcaatcatcgtcgggctggtgctgggcaatctgctcaagccgggcgccggtacggagttgtcgagcctgcacgcggcaaacatcaccctgcccaccagcaacggcggtgggcatagcctggggcagatcgtcgtcggcatcatcccggataatgtgatcagcgccatggcccagggcagcttgttgtcggtgctgtttttcgcggtgatgttcggcctgggcgtcgcgcgcttgcccgccgagcgcaaggacccggtggtcgcactgctgcgcggcgtgtctgacgcgatgttcaaggtcacgtcgatgatcatggcctactcgcccatcggcgtgttcggcatgatcgccgtgaccgtggccaacttcggttttggttcgctgttgccgttggcgaagctgatcatggtcagttacgtgtccatcgcgttctttgtactggtggtgctcaacctggtggcgcggctgtgcgggatcaatctgtttgccttgatgcggcatatcaaggatgagctgatattggcgttctccaccgcgagttcggcgtcggtcatgccgcaattgatgaagaagctggagacctacggggtgccgccgtcgctggtgagctttgtggtgccggtgggctactcgttcaacctcgacggcgcctcgctgttccttggcatcggcacgctcttcgtggcgcagttgtatggcatcgatttgaacctgggggatcaggcgctgctggtggtgaccatggtgctcacgtccaagggcgccgcaggcgtgccggggttcatgttcgtgattctctcggcaacgctcgccagtgccgggttgccattggaggggattgcgtttattgccggggtgtatcgcttgatggaaatgccgaccaccgcactgaacgtgctgggcaacgcgctggcgccgttggtgattgcgaagtgggagggccgggaggtgccaggggctcaccaaagagcacctacgcggtaagtttcctgatgatgtgtaggacttgcctgattccgccggctcggctggaacctgccgctttttttcgctagattcctccccaacgcatatgggcaaccatgtgcccaccttccgaggcccgttgcgagaaatcgcacgggctttcgtgtttctcatggatggggaaatcgaatttggtgcagtacattgcttatctggatgagtttgggcacgtgggccaatatgtctcgcgaaaacacccgatgtacaagaccagccctgtattcgggttaggcggcatgctgattcccgccgaagaggtgcgcgagttcgcaatctatttctacaagctcaaatgccagttactcgcctgggacctgaaacacaaaaaccctcatcacttgcctgcctatcaatgggaaaagaaaggctctgcactttttactgtgggtaatgtgcgcaaatatccggagctgcgaagatcctcatgtcgtttgctgagtcatatccagaaaactggcggacacgttttctacacgggtgagcacaaatctatcgagcccagggaacacgactcgaccgagaccttcaagcggacgctgttacagtcaatccgcaagattgatcgcttctgtacgttgaacaatgcctcgttcatcgttctgctggatgagcagaaagcaggcaatgaatggcgcgaacgaaacgtagaagcctgtaccctggcgatgtttgaagatccagcagaaaaatgccgcacactgatagagcctccgcttcaaggtgagagctatctgtttcaaacgttgcaatgtgctgactggctgtgcggattgattggtcggctgacgacgtttgctgtcgctcctgaggagttcgaagactggcaacttttcgatatgtattttgcggcacgcatggctgacgtgaccctgccgagcagtggtctggacggtaaaaaaacggccaaagccaaagagcaattcgctcaattaacagcaaatgactgttaatcattgggccaaataaaggcgctcctgagagcgcctttattcagttcaactcactgctcgccgatggatttcacatccgccttggcagcgccaccaatcgcaatgcgttttggcttggcttcctccggtaccaccctgagcaggtcgatgctcagcaggccattggcaagctgcgcgccctgcacttcgatgtggtcgaccaggcggaacgacaagcggaacgcgcgctgggcgatgccctggtgcaggtaggtgatgccctcatcgtgttcgcgcttgccgccggcgacggtcaacacgcctttttccacctggatttccaggtcatcctccaccaggcctgcggccgcaatcacgatccgataatgatcgtcaccgtgcttttcgacgttgtgcggtgggtaggtggtgccggcctcgctgcgaagcgccgattcgaaaaggtcgttgaaacggtcaaagccgacggagtgacggaacagtggggccaacgaaagagtagtagccattgcaaaatctcctgaggtttctccaagtgatttgatacgcgacccgcattcggcatcgcgtaaaacctaagtaggttcgggctgaaaattttcaagcggccccacaaaatttttttatccgatgtgacgagctccggacgaaaggctgacacaccggcgcgccaggaccgtcgtggggtcaaccagggcgacccggtgggcaccgatctcgaacacctcacaatgcgccagcaccaacggtaactcggtacacccgagaatcaacaccttcgccccctgctcacacaaatgctccgccgccagcagcaactgctcgcggcacacgccctcggtaaaccccgccttgatcccccgttcgccgtagatcgcctccatcaccagcgcctggtaatcaaagcccggcgtgatgagttgcaagccgcagcgccgcgcggcctggtggtagacctggctttgcagggtgccggacgtcgccagcaagcccacggcctggccgctgccgtgggtgtgcacgatccactccaccgtctcgctgagcatgttgacgatgggcacgcgcaggtgcgcctggatgcgttcgacaaacgcatgggcggtgttgcacggaatcgcgatggcctgggcgccggcgctttccaggcgtttgcaggtggcgtacagggccagggtcgggtcggtttcatcacgcagcaggttggcggtgcggtcgggaatctgcgggttttgctccaccaccatcttgatatggtcctggtccttgtcggccggggtatgggcgaccaccttgcccatgaaatccacggtggccgccgggccgacgccgccgacgatgcccagtttgaacggcggctgacgcgccgggccatcggcctgggtggcgaactcggcgtagatctggttgatgtcgagggcgctgatgccgcgccgttgcaggtcgccgcagaccagcgacaactcggtcatgcccggcacaatcaccgtggcgccctgcccttgcagcgacaggcacgcctggtacaccgactccagcggcacgccatcgaggtggccatccttgatgccgttgacgccgtacatcgcctccatcaaggcggcctgggcgtggttctccgggtagaccaggatgaagtgctggccgaggtgccgttcaaacaagccgccgtggcgcacgaagtccgatgcgatcacgcccaggatggtgccgggcgcgacgtggcgggtgatgtgccggaccagcgcctgcatcatgtccagcaccggaatgcccagttcctgctggatttcagcgcgaaaggtctggctggcgaaacacggtagcagcaccgcatccaccccggtgttttcaaaggtcttgcacacctggaacacatagaacttgcgcgcggtcatgctcgcgttacggtccaggggcagcaacacatccttgaacggatgctgctcaaacaggaagtgatagcggccctggtcctccagcacggcacgggacttgaccagcttgtagaacagatcgccgcccgccagcgaaccgagcccgccgacgatgcccagccgggaggtggggttcatgcgtgcgcaccctgcggcagttcagcggggtcttccgcgctttcggatttggctaccaccgccgtggcgatgctgttgcccaccacgttggtggcggtgcgcgccatgtcgaggaactggtcgataccgatgattagcaacagacccgcctcgggcagattgaacatcggcaaggtcgccgccaccaccacgaccgacgcccgtgccacccctgccatgcccttgctggtgatcatcagcgtcagcaaaatcagcagttgctgggtgaaactgaggtcgatgttgtaggcctgggcgatgaacatgatggcgaacgcctggtacatcatcgagccgtcgaggttgaaggaatagcccagcggcagcacaaaactggagatccgcttgggcgcgccgaacttctccagcgcctccatggttttggggtaggccgactcgctgctggccgtggaaaacgccagcaggatcggctcgcggatcagcttgccgagggtgaacaccgagcggccgagaaacagatagccggcggcgaacaacaacacccagagcaaggcgatccccaggtagaactcggcaatcagcttggcataatcggccagcaggcccaggccattggtggtgatcgccgaagcaatcgcggcgaatactccgagcggcgcgaaggccatcacgtagtcggtgatcttgaacatcaccttggccaactcgtccacggtgtcggtgatgcgcgtgtaaccggcacgcctgaccccggcgagggcgaagccgaagaacagcgaaaacaccacgatctgcaggatctcgttgttggccattgcctcggcaatgctgcgcgggaatacatggctgatgaaggtcttgaggctgaagtcgccggtgttgaccggcaccgctgccgtcgcatgttgcaccacctgcatgttcagcccggcgcccggttggaacaggttgaccaaggccatgccaagcatcagcgagaccagcgacgccgtgacgaaccacagcatcgcacgcaagccgatgcgccctaccgagcgcgaactgcccatgctcgcgatgccgcccaccagggtggcgaacaccagcggcgcaatgatcatcttgatcatgcgcaggaaaatatcggtgaccagcgaaaagtatccggccagctccttggcggcctgctcgctccctgcatagtggtgacacgcccaacccaccagcacgcccaaggcgatgccgactgcaattcgacgggggagtttgttcttcttcacaggtgcggccctcagatggcttttgttgtatggagcggattctagggacgcaccccggcggccatgatgagtaatccggctaaccccatgcgcttttggaatagtttgcaaaaagcccagccccggctacgcgcggcgacatacactcagggctcatcgcctggagaaccggcatgcagatcaaatggttggacgacctcttggccatcgccgagtggaagaacttctcccgcgccgccgaagtgcgttgcgtgacgcaatcggcgttgtcgcggcgtattcgctcactggaggaatgggtgggcgtcgaactggtcgaccgtggcacctacccggtgcaactgaccgccgcaggcgccgccttctgcagcgaaagccgcgacgccctcgccggcctgatgcgcctgcgcgccagcctgcgcgaagtggaacgcatgccggggcgctcgatccaggtgaccgccgcgcacagcctgtcgatgaccttcctgcccaagtggctgacgcagttccagcgccagaccgagcagttcaatgcacgggtggtggcggcgaatattcatgacgcagtgattgcgctggaagaaggcagttgcgacctgatgatcgtctaccaccatcccctggcgccgatcctgctggacgcgcaacgcttcggcagcctggccttggggcatgatgcgtttatcccgttgtgcgcaccagacaaacgcggccgaccgctgtatcgcctgccggggagcacggggaagcctgtgccgcatctggcttacaccgccaccacgttcctgggccgcgtcgcagaaatcgtgatcaagaacggccctgcgcccgccgtgctggagcgctgctacgaagccgacatggccatgcttttgatgcgcatggccattgaagggtatggggtggcgtggttgccgcagagcgcggtggtggatgagttggagcgtgggctgctggtgcgtgcgggtggcgaggaatggagtacgcggttggagattcgctcgtactgcgcgattgaaaaccagaacccgacgatgaggaagttgtggcgcacgctcgaagggttgcgctgacgttaatgcacctgcggcatcgcccttcgcaaacgctgggccagtaaatcggagaacgcttgcgccagggccgtacgggggacatcactgcgaaaaaccaggccgaatgagtacggcaaaaccggtagaaaaggccgcgtcacgatcggcaagtccaagaaatcattggccagcaattcattgatgatcgacacgccgatgccctcggcgacgaacgcgcaggcggcacctgccgaatgcacttccatacgcacgttgggaagaatggacgcctgccgaaacacctggtcaagctccgtgcgcaggttgcgctggcggcccagcagcaccaacggcacaccgcgcaaatcactcacctggataacgcgccttgcgcacagcgcgtgcgcttggggaagcacgcacacgccttgcacctgcaacaccggcaccacgtcgaagcccggcaattcggtgggcagacgcacaaaggcaaaatcgacgctgcggtccagcaccgcacgctcaagcgcatcgtaggagccagtgaccagttcgatcacaaggtcatcgcggccctgcatgaattcggccaccacacggggcaaccattggtgggtcatgctggtgggcaccgccacgcgcagcagcgcccggcctgcgtgacccaggcgcagatcgtcggccatgcgctggacgcgttgcatgttgtcgaccagccccgacacctccggcaaaaacgcctcggcctcggaggtcggcgtcagcctgcccttcctgcgcaggaacaaggcaaagcccagtgactcctcgagctggctgagcaaacggctgatggccgactgggacaagcccatgcgcgtggcggcatcgatggtcgaaccggtcgacatgatggcctggaaagcttgcagttgtttgagattcacgctcgggctccaagcagacacgactgggcgcagtttccgctggcgacacctgcggcgtccagccttacagccctaccagagcttgatgtcgtaggtcaggtacaggcggttgtagtcccaactggtgagcacattggagcggtacgccgtgttgcgaaattctgcccccaagcctttgaacgtgccgtcctggatcacgtacttgaggctggtatccagctcgtgctcatcggccggtttgccggaatacttggcgtcgaaacctttgtagtagcggaccatgaaactcaagcccgggatcgccagggcggaaaagtcatagtcgtagcgcagcatccaggttttctcatcctccaggatgaatttgctcacccccggactggtaaaggacgtggtggccgcaccattcaaatacggcaatgcggcgtcaccggacaactgctgatagccaccgccgaacgtgtgcccgccgagtcgataactcaaggagccgctgaacatgtcggcgtccgcagcaccgttataggccgcccccgtttcaagactgttgtaataacgtacgtccgtcgtcaagtgacccggcccgacagctactttatgcacaaccccgaaaaagtgctggcgatagaagttttcaagttcaccgtagtaataagacagactgatggttttattcagtgcatacgtaccacccgcaaaataaaaatcaccgtgcttcgggcctttgtaaccgctcggtatcagatcgacgttatcgctggagttacgcaactttgattgatccagtcgcccaccttgcacaaatagatgttcgataccggtgtattcaaactgcgtgccttggaacgtctgtggcagcaaacgcccatcgttgtaactgaccaccgggttcttgggcaacaacgtgcccgtcttcaccacgacatcggcgaaacgcagcttgccggtcacgccgaggctggaaaaatcacgcgcggcgcggccatcatcctgcactggcaacaggcctgtaccggcgtgtgcagggctggagtcaagcctcagccccagcaggcccagggtgtcgaggccaaacccgacggtcccgggggtgaatccggaacgcatcgtcagcaacaacccctgtgcccattcgacacggtcgttgccgccgctgcggttgtcatgattgaaagcgtaattacgcaacgcaaggtggccggtggaatcctcgaggaaaccttcggcgcgcacgcttgatataccaggcaccattaagctggcgcacaaaagcccgccggtcgttataaacgcacgcatattaaagccctcagctgtgtttttttttgtggcagagagtaagaaaagttgcttgaccaagtatttcctggccgatgctcctgagtgttaatgaccgaaacgagtaaacaacgctatcgaattaaaacaggggcgacaagcttatgacaaacgcgcatcaggctatgacaaataacccgacgacaccttgaaacgcatagcccaatacgcgttcgtcataacattgtgaggtatttatgattgccctactgtgccgttgtagccgttggctatccccataaaaaaaagatgagagcaccgctatgtcatccactgcgccaacagtcaccgacaccgcgccacccaaaaacacccgccaactcaacccggcaatcatcttgctgagcattgtgttcctggccatggtgctgacttatgtggtgcgctccggccagtttgaacgccaagacgtccgtgtgattcccgggacctatcaggtactggaaaaagacacctcgctcagccaactcttcgccctgccgccgcgctcggcgaataaaaccgtggcacaaccggtatcgctggccgagacctttctggccattcccctggccatcgagaaacgcgccgggctgattttcatggtgctgttcatcggtggcatgtttgccgtgctgaacaagaccggcaccatcgatgccggcctggaccggctgctcggcgccaccaaaggcaatgtctacatcctggtgccaaccctgatgctcgcattgtcggcaggcagcaccttcatggggctggcgaaggaatacatcatgttcgtgccggtgatggtggccatggcaaaccgcctgggcctgcccaacatcgttggcttggcgatcgtcgcgctggcggtcaagacggggtacatgggctcgatttccaaccccatcgcgctgtctgtcgcacaacccctggtcgggctgccggtgttcagcgggctgagcatgcgcatcgtcgcgtacttcatttttgtcacgctggccgtcggctacatcctgttctacatccgccggagcggcttcgatacctcggccacgttttcccattcgggcaaaaaactctccgcgcggcataccctgagcctgatcacactgggggtgggcgtcggcttcctggtgtacgcctccaacacctggcactggaagtaccccgagctgtcctcgtattacctggcgctgaccatcgtcttcgccgccatcgcaggcatgagcccgagcaccacggcaagcacctttgtcgaaggcatgaacaagatgctcatggccggcgtgctgattgcactggccacggccgtggagtcgatcctcgccagcggccaggtgctggacaccatcgtgcacgggctgtcgcagatcatcggccagcacggccaactgcctgcggcgttcggtatgttcttcgcgcagatgagcctggatgtggtgattccgtccaccagcgggcaggctgcggtgacgatgccgatcttcggtccactgggccaactggccggcgtgagcccgcagaccacggtgtatgccttcttgctgggcaacggcttgaccaacatgatcacgcccacttccagcggcctgctggtactgcttgctgctgccaatgtgggctgggtgcagtgggcgcggtttgtgctgccgctgttcctgatctgcacggcggtggcgttgctcctgctcgcctgcgccgccctcaccggctattgaattcgactgaccaaggctttgtcatgaccctccctgcattcgaaaacatgcacatcgtacgcaaccagatgatcaccctgcgcgatggcgtgcgcctggccactgacatttatctaccgctgggcaccggcccctggccggttgtcatcgagcgcacgccctacgacaaatccggcccctcgcgctcggaaaaacgcctggacgggctgcaccttacccgcgagcagatggccgcagcctttaccgagcagggctttgtggcgatcttccaggattgtcgcgggcgttaccgttctgaaggtgtgttcaccaaatacatcaatgaaggcgaagacggctacgacaccttgcgctggatcgtcgaacagccctggtgcaacggccatatcggcagcatgggcttgtcctatgcagcgcacacgcagatggcgatggcctgctgcaatgcgccgggtctcaagaccatggtgctggactcgggggggttcgccaacgcctaccagtgcggcattcgccagggcggcgccttcgaactcaagcaagcgacctgggcctacaagcaagcccaacaaagcgccgccgtgcaggccgacccgcagttgcgagaggcgttggcccaggaagacattctcgattggtttgcacgcatgccgtggcgcccagggcattcgccattgcgccatgtaccggagtatgaaaactacctgttcgagcagtggtcccacggggacttcgatcagtactggaagcaactgggtatctacgccgaaggtttctacgagcagatcccggacatcccggtgttgttcatgtccagttggtacgacgcctatgtcagttgcacgctggacaacttcacggcgttcaccgcacgcaagcagtcacctcaacgcctgatcatgggcccgtggctgcacggtgaccgcaacatcagctacagcggcaacgccgaatttggcaacgccgcgcctttcgacggcaacctgggcgaagactggttgagttgccgagtggaatggatgcaacgctggctcaaaccaaccgaagccgaacggcgcgccactcatcaggtcgatgtgttcctgatgggcggcggcagcggccgaaaaaatgcgcagggtcggctggagcatggcgggcgctggctcaagtcgccgtgttggccactcgcgggcagccaacagctgaacctttacctgacagcacaaagagccctttcgccgcttgctcctgtgggggtgcccagttcattgagttacttcagcgatcccgcccacccggtaccgaccattggcggctcgttgacatcgggcgctccggtgtttgtgggcggcgctttcaaccaggtcgaaagcccggactttttcggcactcggggtgaccactcggcactgtgcgaccgagatgacgtagtgagcttcgaaacccaaccgcttgagcacgactgggtggttgccggcccggtgaaagtcgaactgtgggtgcacagcagcgcgctggataccgatttcaccgccaagttggtggacgtctatccgccgagcgacgattacccacaggggtacgccatgaacatcaccgacgggattttccggtgtcgctaccgggactcgtgggaacacccggctccgctcacgccgggagagccgttcaaggtggtgatcgaacccttcgccacctgcaacctgttcaagcgtggccaccgcctgcgcctggatatcgccagcagcaactttccgcgcttcgatgtaaaccccaacagtggcgaggccgaaggcatgggcgagcatccgcaggtggcgcgcaataccgtgcatatcggcgccgggcatccgagccgtttgatactcacggtcgtggacaacgcgctctcggaggcggaccaaaactgatgcgcgaggcgatttactgccgaaatcgcattgacatatcggtaaatctcgatatcctcgcgccatggacctactcgacatattcaaagccctctcgaaccgtactcgactcgacatcctgaaaggtttgaaggaccccgaaaagaacttccccccgcaggatgaaggggacgttcataccgtgggcgtctgcgtgagcagtatccaggaaggcgtcgggctgtcgcagtcgaccgtgtcggactacctggcaacgctgcatcgagcgggcttgatcgaaacccgccgcatcgggcagtggacctattacaagcgaaacgaagcaaccatcagcgcccttgccgagatcatcggcaaggagctgtaattttttgccccagaatatcgagaattcccgatatccctttttaccgaaacctacggctattgaaacctaccgctattgaaacccacgactactgaaacgaggtaatgcaatgaaagcgatgatgcttaaatcatttggcggcccggattcgttcgaacgctgcgaggtgcccaagccggtaccgcacacgggacaggtgctggtgcgggttcacgcaacctccatcaacccgctggattaccaggtgcgacgtggtgactatgccgagctggtgcccctccccgccatcaccggtcatgacgtgtccggcgtcgtcgaggccgtaggcccgggcgtgacgaacttcgcgccaggcgacgaagtctggtacaccccgcagatattcgacggccccggtagttatgccgaataccacgtggcggccgaaagcatcatcggtaagaaaccacctacgctcagtcacctcgaggcggcaagcctgagcctggtgggcggtaccgcatgggaagcgctgaccgtgcgtgcagcacttcgggtgggggaaaacatcctgatacatggcggcgcgggcggcgtcgggcatgtggcaatccaactggccaaagccatcggcgccaaggtgttcaccaccgtgcgtgaagccaatatcgagttcgcacagcgcatgggcgccgatgcgatcatcgactacgaaaaggaagattacgttgacgcgatcctgcgggaaacgggcgggcgcggcgtcgatgtggtgttcgataccatcggcggccacacgctttcacgcagccccgacgcactcgcgcaactgggccgcgtggtctcgatcgtggacatagcgcaaccgcagaacctggtacaggcctggggcaagaacgcgagctatcactttgtgttcacacggcagaatcgcggcaagctggatgagttgagtacgttggttgcgcagggccaactgcggccgcatgtaggggcggtttatgcgctggccgacatcggacttgcccatgctcggttggagggtgctcacaacggaattcaaggaaaaatcgcgattgccgtcgtgcccgctcaggaaacaagaccatgatttacgagatcgccgtgctgccggttcacaaggaacacatcgacgcgttcaggcgtgcctttgccgaggtggcgccgttgctgagtcgtgccaaaggccacttgggtcatatgcttgcgcagggggttgaaacaccggagcgattcaacctgattgtgcgttggaaatcgctggaagaccatacgccggggtttgaagcgagtgaagaccatcgggtgttcatgttgggactggaaaaatacttttcggaggaaccgcaggtttatcacattgagggggcggtttttagcgcctagagaaatccaaggcaaaaaaaagcctgcatcgctgcaggcttctctttatgtcgctatctggctccacgacctggactcgaaccagggacccaatgattaacagtcatttgctctaccaactgagctatcgcggaatgcgccgtatgttactgattgaaaaggagaagtcaagctttctctggcattcggcgtgattaaaccggatggccggttgaaaccctgtgctccctggccagttccagccaggccagggcggcgggtggcaggtgggcgctggcgcgccaggccagggcgatgtgccagtcggtgtggggttcgtccagggggatcagggcgatgccggggtgttggtgtttgtgcgccagcatgcgcggtacgaaggctacgcccaggccggcggcgaccaggtcgatgatgaagtcgatctgcccgctgcgagcggtcaccttcgggttgacgcctttgcgctcgcaggcagcgaggatcttggcgttgagggcaaagccggcttcgaacaggatgaacggcgaatcggccaggtcggtaaagtcgatacgttcaaggtcggccagcggatggctgatgggcagcacggccatcaacggttcgttgcgcaccggctggtagtcgaagtcttcgtccaccggcagcagcagcgctgccaggtcgacctcccccgcttccaggcactcgcgcagttttttgctgccgtattcggtgagttcgatgtcgatgtccgggtagcggctgcggtaggtggcgaacatggtcgcgaacagcacgccgcaacccaccggcggcaggccgatacgcagtacgccgcgcttgaggccacacaggtcgttgatctcggccaccaggtcattgcgctcggcgagcagcaccagggcgcgacggtaggcgatttcgccggcggcggtgagctcattgcggtggccgaggcgattgagcagcggcgtacccagttcgtcttccagggtcttgaccgccttgctcacgctggattgggtcagggacaccacctcggcagcctgggaaaaaccaccctggcgcaccacttcgacaaaggcacgcaatgttctcaggttcatcagtattcctttggcgactggctgccagcgataaaagttgtttttatcatgccagagaattgcctatcctgacgccaccttgcccgtggagcctctaataatgatcatctcgtccgcctccgactaccgcgcagccgccaagcgcaagctgccgcgtttcctgttcgactacatcgacggcggcgcctacgccgaacacacgatgcgcgcgaacagttcggacctggccgagatcagcctgcgccagcgcatcctgcgcaatgtcgacaacctgagcctgaagaccagcgtgttcggccaggaactggacatgccagtcatcctcagcccggtcggcctgaccggcatgtacgcgcggcgcggtgaagtgcaggcggccaaggcggcggcgaacaagggcatcccgttctgcctgtcgacggtgtcggtgtgcccgatcgaagaagtggcgtcgcaaagcgcgcaggcgatctggttccagttgtatgtgctcaaggaccgcggcttcatgcgcaacgcgctggagcgcgcgcaagcagccggtgtgacgacgctggtgtttaccgtggacatgcccacgcctggcgcacggtatcgcgatgcccactcgggcatgtccggcccgttcgccgcacagcgacgcatgctgcaagccgtcaccaagccgcaatgggccttcgatgtggggttgatgggccgtccccatgacctgggcaatatctccaggtacctgggcaaacccacccacctggaagactacatcggctggctggcgaacaatttcgatgcatccatcagttggaaagacctggagtggatccgcgaattctggaaaggcccgatgatcatcaaaggcatcctcgacccccaggacgccaaggacgcggtgagtttcggcgctgatggcatcgtggtctccaaccacggcggtcgccaactggatggcgtgctgtccactgccaaggccctgccgccaattgccgatgcggtgggcgatgagctcaccgtattggtcgactccggcatccgctccgggctggacgtggtgcgcatgctcgccctgggcgccaaggcctgcctgctcggccgcgccaccgcctacgcgctggccgccgatggccagcacggcgtggaaaacctgctggacatcttcgccaaggaaatgcgcgtagccatgaccctcaccggcgtcacgtccatcgcgcagatcgaccgctcgaccctggtctaaccctgctgttcgacaatcccgcgcgccttgagttgggccagttgctccggtgacaagcccaagcgctggccgaggatgtcgtcggtatgctgccccagcctcggcgccggccggtgatactccacgggggtgccggacagtttgatcgggctgccgaccatggcgaaatccgggttctgcggatgggggatcttcaccatcaggttgcgcgcgatcacctggggttcttccagggattgcgcgatggagttgatcgcccccaccggcaccttcgaggcatggatacatgccacccactcatcggcactgcgccccagaaagtgcgccgagagcagcgcgacaatctcttcgcgatgggccactcggtcagcgttacgacggaagcgcgggtcgtccggcagatgcgccaggccgatgctctggcacagcgcgacaaactggctgtcgttgccgcaggcgatgatgaagtcacggtcggcggcacggaacacctggtaaggcacgatattggcgtgggcattgccatagcgctgcggcaccttgcccgaggccaggtagttcatgctttggttggccaaggtcgcgacctgcacatccagcaacgccatatcaatgtattggcccacgccggtgcgctcacggctgagcaatgcggcctggatcgccacggtggaatacaggccggtcatcaggtcggagaacgccacgccgactttttgcgggccgccgccgggcaggtcatcgcgctcgccggtgatgctcatcaggccgccgatgccctggatgatgaagtcgtaacccggctcctcggcactcgggccggtctggccgaaaccggtgatggagcaatacaccaggcgcgggttgagctcggccagggtcgcgtagtccaggccgtagcgggccagggagccggctttatagttctcgatcaacacatcggaactcgccgccaatgcgcgtaccaactcctggccttcgggagtggcgatgtcgatggccacggacagtttgccgcggttggtcgactgataatacgaagcctcgccagacgactcgccggtgtcggttttcatccacggcgggccccagccacgggtgtcgtcgccgcttttcgggcgttcgatcttgatcacttccgcgccgaggtcagccaacacttgcccacaccaggggccggccaacacacggctcagatccagcacccgcaaacctgtcaatgcacccattgttcttatcctgtgaggttgggaaatcagccgaggctcggctcttcatggcgcagggaaacccccagcagtgcccgccgccgcagccacgggctggggcgatagcgcgggtcgttggtgagttcgctcatgcgctgcaaaatcgtgagcaggcgccgtggcccgagggcatcgccccaggccagcgggccgtgggggtagcccaggccgagctgcacggcctggtcgatatcctcgacgctggcgatgcgctgctgggcaatgtcgcaggcgaggttgaccaccatcgccaaggtgcgctgggccacaaagccgacgctgtcgccgatcaccgtgacgcccacgccatccgctgcgagcaaggcgtgagcggcatcgcgcatcgccggggccgtcagcgggttttgcatcagcgtgcggtggcgtgacaggtccgtcagcacatcgatgcacagcgtgcgcgccgggtcggtatcgaagcgcacgcaggcgctgctggcatcgcggccgtaaggcgccaataggcacaacgcctgcggcgacggttgcgcagcgtgttccagatgggcgcccaggtcgatcaccagggcactcaagcgctcgtagtcttggctgttttccgtggcgatccacaccgggggcagcgcttgcaccgtgggcaccgcctgggggtgcggggcgttgatgagttggccgttttcatactgatagaagccgtggccggtcttgcgtcccaggcgaccgcctaccagcatctgccgggtcaggggcgacggtttgtagcgtggctcctgatagaactggttgtagatcgactccatcaccgggtgcgacacgtccagcccggtgaggtccagcagctccagcggccccatgcgaaaccccgcgccgtcgcgcaggatgcggtcgatatcgccgcgctcggcgatgccttcctccagcatcttcagggcttcggtgccgtaggcccggcccgcgtggttgacgataaaaccgggagtgtccttggcgcgcacgccgcgatggccggtgcgcgccaccagcgccagcaaggcttcaccgaccttgggcgcggtggccaggccatcgatcacctccaccacgcgcatcaacggcaccgggttgaagaagtgcaggccggccacgcgctcggggtgccggcaaccggtggcgatggccgtgacggagagtgacgaggtgttggtcgccaggatgcaacgcgggctgacaatgccttcaagctgttgcaacaggccgcgcttggcgtcgaggttttccacgatggcttccaccaccaggtcgcaatcgcgcaggtcgtcgatgcgctcgaccacctgcaagttggccaacgccgcgtccatcgtcgcctgactgatcttgcccttgcccaccagtttggcaaacgtggtaccgagggtgtcacgggccgtttgcgctgcgccgtcgcgagaatcgaacaggcgcaccaccacaccggcctgggcggcgatttgcgcaatgcccgcccccatcacaccggtgcccaccaggcccagcgtattgataatgtcggtcatgcttattccccccggtattgcggcgtgcgcttttcgaagaacgccgcagcgccctccttctggtccttggagtcgaacaacaattggaacgccttgcgctccagcaccagggcgctttccagcggcaggtcggcaccggccagcatcacctccttgatctgctccaccgccaacggcggcagcgcggcgatctgcgcggccagttccagggcgcggggcagtgtctggtcgtcgctgaccatctcgctgagcatgcccatggccaaggcttccttcgcgctgaccatgcagccggtgagcgcaatgcgcatcgcctggaatttacccaccgcacgcaccagccgctgggtaccgcccgcgcccggcatcaaacccaacttgacctccggctgggcaaaccgcgccgactcgcccgccacaatcaggtcgcaatgcatcgccaactcacagccgccgcccaaggcaaaaccgttgacggccgcaatcaccggcttggggcagcggctgatggcttcccacaagtattcggtgtggcggcggtacatatcgatcgcgccggcagcggcgaactccttgatatccgcacctgcgacgaagaactgttcgcccccggtcagcacaatggcgcgcacatcctggcggcgagccagtgcacggaaatgctcggcgagcgcttcacgtacctgggcattcagggcgttcttgacgtcgggacgatggatacgcaccacggccacgccattgtcctggacgtcgagggtcaccacgggtgggttagcgttggtcacattcactcctgctgcactgttcttgttagttggattacgctagtttcgctgtgcgaaataacattccgcatttgtcgataatcataagtatcgaccccgcaggtgtaaacgtaaaaacccgatctcattctaaaacagtgactaactcgctgttttactaggctttatcgcattaaaaaatcacaacccaaaaagttgcttagtttcgctgtgcggaatactattttgttttgttgattttataaaaaaatgaggcttaacatgcgccgtcgaaacccggactcggacaacaacgaagtcccagcaggcaacaacgctttcgagcatttgttgattgacccgatgcacaacgaggaggaggaagacaaggaccgccagttcgtcaccgccctggcccgcggcctggaactgctgcgctgtttcacgccgagcgagagtgtgctgggcaaccaggaactggcgcgcaagaccgggttgccgaaaccgacgatcacccgcatgacccacaccctgacccgcctgggttacctcaggcacttgccccagtcgggccggtaccagttggacgtgggcgtgatggccttcggttacgccatgttgtcgaacctgtcgatccgcgccgtggcccacccgttgatggagaccatggccaagtacgcccaggcggccgtcgcgatggccacccgcgaccgcctcgacgcagtgtacctggacgtggtccagggtgaagccaacatgaccatgcgccgccaggtcggcacacggttgccgttgcacttgagttcagcaggccgcgcctgcctggcagcgatgccggaaaacgagcgggagttcattctcgaccacatccgccagcgtcatctggaggactggccgaacatccgcaaggggctggaacgcgccttccgggactacaccgatttcggctattgcatgtcgatcggtgagtggcaccgcgatgtcaatgccatcgccgtaccgctgcgacacgcacaacacggcttgctggcgttcaactgtggcggaccgagtttccacctctcccgggagaaactcgaagacgacatcggcccccgcctcaagcacatggtgaacaatatcgaggccgccacccgttagctggaccggtgcatggcctcggcagattgacgataacaggcccgccgaacgggccgctgagggcggcacatgatccgagacgcacaaaccctgcatatcctggtggacgccattgcgcagttcgtcgatgacgcgctgatcccacgggaaaacgaagtcgccgagaccgatgaaatcccggccgacatcatcagccaattccaggacatgggcctgttcggcctgaccatccccgaagcctacggcggccttggcctgaccatggaagaagaggtgaccatcgcctttgaactggggcgcacctccccggccttccgttcgtacttcggcaccaacaatggcatcggctccatcggcatcctgctcgacggcaccgaggcgcagaaggagcactacctgccgttgctggccagcggcgcactgcttagttcgttctgcctcaccgaacccgactccggctccgacgctgcctcgctgaaaaccaccgccgtgcgcgatggcgaccactacgtgatcaacggcaccaagcgctttatcaccaacgcaccccacgccggaattttcacggtgatggcgcgcaccgacccggcgattcgcggctcgggcggtatcagcgcgtttatcatcgaacgtgacacaccaggcctgtccctgggcaagcgcgatcacaagatgggccagcaaggcgcgcacaccagcgacgtgatcttcgacaacgtgcgtgtgccggccagccagttgatcggtggcgtggaaggcgtgggtttcaagaccgccatgaaggtcctcgacaaaggccgcctgcacatcgccgctgtcagcgtcggcgccgccgagcgcatgctgggcgacgcgctgaactacgcgatcgaacgcaagcaattcggccagccgattgccgagttccaactgatccaggccatgctcgccgacagcaaggccgaaatctatgcggcgcgctgcatggtgctcgacgccgcgcgcaagcgtgacgaaggccaggacattggcaccgaagcctcctgctcgaagatgttcgccaccgagatgtgcggccgcgtggctgaccgctgcgtgcagatccatggcggcgccggctatatcagcgagtacgccattgaacgtttctaccgggatgtgcgcctgttccgcctctacgaaggcactacgcagatccagcaactggtgattgcccgcaacatgattcgcgcggcgcaacgctaagcaccacccatacccaatgccctaacaactacaacaaggtatcgctatggaagtcgccgcatcggcgggcgcgttgtcgcctgcaaaaagcaaactgtggatcattgtctttatcttctgcttcctcggcctgttgatcgatggcgcagacctgatgctgctgtcctacagcctcagcagcctgaaggccgagttcggcctgaccagcgtcgaggccggcagcctgggcagtttcaccctggccggcatggccatcggtggcatctacgggggctgggcctgtgaccgcttcggccgggtcaaaaccgtggtgtggagcatcgtgctgttctccgtgggcacggcgatcctgggcatgacccacagctattggcagttcgcgagcacgcggttcttcgcctccctcggcctgggcgcgctgtacgtggcgtgcaacacgttgatggccgaatacgtgccgacccgctatcgcaccaccgtgctcggcacccttcaggccggctggtcggtgggttacatcgtcgccacgctgctggccggttggatcctgcctgaacacggctggcgctggttgttctacgtggcgatcatcccggtgatcctcgccgtgttgatgcaacgcctggtgcccgagcctcaagcctggctgaccgcacgggccgagcgcgcgcaggagaaagccaatggcacccggcacgccctgcagagcaagcccgacggcatgttcaagctgatcttcagcgaccccaaagccagccgcatgttcctgctctgggccctgaccgcaggcttcctgcagttcggctactacggcgtgaacaactggatgccgtcctacctggaaagcgaactggggatgaatttcaagtcgatgaccagctacatggtcggcacctacgcagcgatgatcttcggcaagatcctcgccggtctcgccgcagaccgcctgggacgacgtaccgtattcgccgtcggcgccctgggcacggcggtcttcctaccggtgatcgtgctgttccagagcccggagaacatcctgtggatgctggtggtgttcggcttcctgtacgggattccctatggtgtgaacgccacctacatgaccgaaagcttcgaagcgaagtttcgcggctcagcggtgggtggggcctacaacatcggccgtattggtgcggcagtggcaccggcagcgatcggtttcctggcgtcccatggctccatcggcatggggttcctggtaatgggcggcgcgtacttcatctgcggcgtcattcctgcgttgtttatccgcgataaacagttcgatccgcaaaaacagtaagcgcggcgtccgtttgccaaataactggcgtcattcttcggcgactgtttttagcgataaaaacagtcgcttgatttgtaaggctttttatttaattgaacgaatgtggcatgaatctcgctctaaccctgttcaagcaggttaagcgatgacaagacgtgcggcagtgcccaggggttataacccatggtaaagcggtctaaactgtaactcatgttttacggaactgaaggaacagtaagacgcttggcattcgccactctcatcgagcctgtaagacagttgagtgcttagaggcgaaacggttatgaaaacacctacccagacccatgcaattgactttgacagtgccaaattgcaacgcctgggctttggccaacccgccctcctgccgcgccgccccaccaccgttatcgaacttcgccagcaactgggccagcaactgcaaaccagcctggaaccggagcgcattctcgcggtgttcttccgtgagatccaacgcctggtgcccttggacgccctgcactaccgtcaccaagccagcgacctgcgcctggagttcggccatcgcggtcatcactcgatgagctacagcctgagccatgaaggcgagcacctgggcgagctgatctttcggcgcaaccagcgcctgcaggaagaagaactcggccagcttgagtccctgttggcgaccctgctctacccgatgcgcaacgccctgctctaccgcgccgccacccgcagcgcgctgcgtgacccactgaccgagaccggcaaccgcatcgccatggaccagaccctgcaacgggaaatcgacatggcgcgccgccacctcaatccactgtccttgctgatgctggatattgaccacttcaagagcatcaacgacacccacggccacgccgccggcgataacgtgctgcgcactgtggcgacatcgatcaagagccagttgcgtaacgtagacatggtgtttcgttatggcggggaagagtttctgatcctgctgtccaacaccggtcgcgatgcggcggcgatggtcggcgaacgcctgcgccaggcagcacaggcccaggattactgggcggacggaacacggatcgaattgacggtgagcctgggttgctcgaccttgctggcggccgaatctgccgaaagcctgctgcgccgggccgatagtgcgttgtacgtggccaagcgcgaaggccgcaaccgcctggcgatggcggggtaacccccgccatctgctctgcatcaggcctcgctggcaacccgcgcctgacgctcacgcatcaccgcaggggctttttctttctccagacgcatgcagctttccaggaacaaatacatgtagtcatagcttttgcacacagcctggcgcagttctgcctgcaatgccttggtcgggttcatcccggccagggtgcagatgatctccagcgcttcccacgggtgggcgtcatcgtactgggcatgcatcttcaaccacttcatcgcacgcttgcgctcttcctcggggaaggccgccgcgtagacaccggtggaacacaccacggcggaccactcaccggtcgcgccttcgatcgcgtagttggtcgcggcaatggccacgatcagcgaatcggcagaactggtgtgccagcaccaatggctgagggcgtgcaactccggcggcacgtcctgggcctgtaactcgtccaggctcacgccgtgggcacgggcccaattgacccaataatcggcgtggttgagttccacacgaatattgcgcatcagccagcggcgcgccatgtcctccccaggatggcgggcaaatttggtcttggtcaggttctgtgccatgtacaaggcaaactgttccaccaccggccagccaccgatcaggtagtggcgcagggtcttggcgctgagcgtgttgtcgcgcatgcgctggtacagttcgtgttcgacaactcggcgcttgctctcgctacagtccaggatcagtttctgagcccaggcggggtaactcgaggcttccataagcgggccggttctgttgaatgtgtcgatcactgtaaggctcctttttaagtgtgattgtacagaccagcaaagttttcagcggaatgtgccgggcgccttgaataacagaggctgcggccgcacaggtcgacactgcaagctatcaaaggtaaacaattgcggtcgttcaatcaggtagccctgagcgtaatccacaccaatttcgagtaacgcctgttcgatgtgcggtgtctcgacaaattctgcaattgtgcgcttacccatgacatggccgatgtggttgatcacttcgaccatcgcgcggttaatcgggtcgtccagcatatcctttacgaaacttccatcgatcttcaggaagtctacaggtaaatgtttgagataagcgaatgaggacattccggcacaaaagtcatccagcgagaaatgacagcctaaggctttgagttcattgataaagcggatcgcactgcccaagtttgcaatcgcactggtttcagtgatttcaaaacagatcatgcccggcggaatattgtatgtatgaaacttctcacgcaaaaacccaaggaagtcatcatcaccaatggtgatgcctgacagattgatcgcacacatggccatggggcgccccgggcgttcctgcatgcagcggttgatgatcttgaacacattctccaccacccaacggtccagcgacgtcatcaagccatagcgttcggcggccgggatgaagctgtccggcaggatgatacggccagcctcgtcatgcaggcgcagcaggatctcgatatgcccattgccgccgtcggtgtgccccaggggtgagatttcctgggcgtagaggcagaaccggttctcctccagggccatgtgcaggcgctgcacccaggccatttcgccaaagcgcacggacagttccgaatcgtcggcgtggtacacctgcacacggttacggcccttttccttggccatgtagcatgccatgtcggcggcgcgcagtgaggtttccagggttgtcggggtatgcccaaggtgcaccaggccgatgctgacggtggtcatgaacggccggcccttccatacgaagtgcaggctttgcacggtgtggcgcaggctctcggcgattttttcggccaccgccgccgggcagttctccagcaggatgccgaattcatcgccgcccaaacgtgccagggtgtcaccttcgcgcaggtccgattgcaacaacgcacagatgtgccgcaacagctcatcacctgcggcatggccacaggtgtcgttgaccagcttgaactggtcgaggtcgaggaacatgagtgcatgccgcccgccctgctgcgaccccgtggggtgaagcacctgttccaggcgatactcgaactcacgacgattggccaggccagtcagggcgtcgtgggtcgcctgccaggacaggttggcgatgtattgacgctcctgggtcatgtcgtgcaacaccagcaccgccccggtcaccttgccggcgctgcggatcggcgcgcccaccagggtcaccgagaccgtactgccatccaggcgctggatggttttcgagtgctcgctgccgccgccaagctggcccttgacgatatgttcgatcaaggtaaagccatcgggctgggcattgtcatccagcaggttgaacagggccgccaggggcagcccctgggcctgggcagaattccagtgggtcagcgcctcggccgccgggttcatgtaggtgatggcaccgtcaacatcagtggtaatcaccccgtcgccaatcgactccagggtgatctgcgcccgctccttctcttgttgcagggcgtcggcaaaggcgtggcgttgggccagcagtttatgcgtgcgcaacagcgccagcacaatcaggcccaacgccgtggccaggttggtgatcaccagcagccgcaggatcatccgcgaaccttcgcccagggcatcgctgaacgccttggcagcgggcgtcacaccttcgttgatggcagtgatatgtgccttccattggcgcacatcgttggcgctgacctggtcgcggctgattgcaccgtgcatctcgcgggccaggtcatccagttgcaccagatagccatcgcccacggtccacagctcgatggctttttccaggtagctgaaatggcggaagttgaggtacagccagatcaggctggaaacgtcatccgggtggttaccgcccttgaggatgcccaggcgcgcggcagcaagatcaggggtggagcggtccagggcaatacgcaattcatgcccgccctggggcacggcgatcgcctgctggtatttgagataagtggtttcgtcgcggttgtcggcatacagcgtcaggtagtagatcgcatctttctggcccttggaccacaggctttcgccagccacataaccacgcaccgccgagagcacgtagaggctgacgcaacccaacaatgcctggaacagcaccacggcgataaagggccagacaatgcccaacaaccgtggcgttccgagagtccgcttttgcttcatgaagccccttgcacatgcactgctggatacgcacgcgaaacaccgcttccgatagctcagcctaggctaaatcaacgtacttgttgcaagtgcccgtagagtttggcgtacaaaccaccgtcagcaatcaattgctgatggtcgccatcctctgcaatgtgaccgccgtcgaacactaagactcgatctgcctgcttaaccgccgacaggcggtgggcgatgatcagtgtagtacggccgctgaggaagcgcgccagcgcctggtgcaggttgtactcggtggcggcgtccagggcggaagtcgcttcgtcgaggatcaccactttcggttcggccaacaccatgcgcgcaatcgccaggcgctgacgctggccgccggaaaaccgcaccccggaacgccccaccacactgtccaggcccatgggcaacgccttgaccgtcgcatccagttgggcgatttccagtgcctgccagcaggcctggtcactgcgctcgcggcccatagtcaggttggcgcgcacagtgtcgttgaacagcgcgggatgttgcagcaccacggcgacgtgctcgcggatggtctccaggccgatgtcctgctgggtggcaccgccaaagcggatagtcccggcctggggcgtgtacaggcccagcagcagttgcaccagggtgcttttgccaccgccgctggcgccgacgatcgcgaccttttcccccggtgcgatggccaggttcaactggtcgaggaccaggtcttcgccataaccgaaactcaggccacgcacttcgatgccgacggtttcgcgcccggtgaacgggtcttcgccgcccgcatattgcggctcatcggcccgtgccagcagctcgttgatccgcgtcagcgccccgcccgccgcatagtaggcatattgcaggttcagcaattgctccaccgggccgatcatgaaccacaggtaactgaacaccgcgagcatctggccgatggacaagtcggaaaacagcaccgtgagcatggccgccgcacggaagatgtcgatgccgaactggaacagcaacccgctggcgcggctggaagcatcggttttccactgggagtggatcgcgtagtcgcgcacttcctgggcccgctggccgaggcgcccgaggaagaagccctggcggttgccggcgcgcacttcctgaatggcgtccagggtttcggtgagtgcctgggtaaaccgcgaagtgctgtcgttttccagcttcttcaggtgtttaacgcgtttacccaactgcaccgtggcgtagatcaccagcgggttgaacagcaggatcagcagcgccagttgccaatgcatccacaccaggatcgccgacgtgcccaccagcgtgagcatcgccaccaggaaccggctgagggtttcgccgacgaatttatccagggtatccaggtcggtgaccaggtgggtggtgaccgtgccactgcccaggctttcgtattcgccgagggaaatacgcttgagccgttcgatcaggcgcacgcggatgcggtacacgatgtccttggccaaccgcgcaaacaaccgcgcctgcaccacgttgaacaccagcgcgccgcagcgcaggaacagcgtcaccagcaacatcaggccgatatagccggcggccttctgccagcccaggggcaaggcgtggttcatcactttgagtgcggcatcgccacgacccagcagcacttcatccaccagcaacggcaataacagaggaatgggcacgctgcacagggtcgccagcacggcgacgccattggcgatccacagggacttcttgtggcgcagggccaggcggcgaatttccgcccaggtcaggcggtcagtgcgttgaggttgctcatgcacaggtggctcgctccagccatcggcccagtagcggcgatagctcggacagcggctggtaaccgttggtcagcaacgccaactggccattgcgctcggccagcagcgtggggaaaccggcgatacccaggtcctgcacccaggtaaaatcggccgctgtggcggcgtgctgctcggcgcggtcaaattcgccggcaaactcgatgcgcgggatacccgcctgctcggccagctccaccagcacactggcgagggtcacatcgcgaccttcgacataaaacgcacgctggatcagccccagcagcttccacgcgcaatccggcgccaggctgcgcgccgtgacgatggcgcggcacgccggctcggtgtcatacacaaaaccgtcgggcagtgcgccgtcacgcttgaacggctggccggtggcgtcggtcaccgcctgccagtgctccaggatgtaccgtcgcgtggtcggctccagcgccgcgccgctgccggtgcgcaagccgcccaccaccagatgcagctccacgccggccgcctgggcctgctccaccaacgcctcggccaccggggcaaagccccagcaccaggaacacatcgggtccattacatagagcaggcgcgcggacatggctcaggcctcggaaggagtttgcttgtaattgaagccaatcgggtgcggcatgttacgggccttggccagctcgatctgcttctggcggtcaatcgcactgcggcgggtcttctccggcagcttatcccagcagtgcgggcagctgatgcctgcgacatagtgctcggaggcgcggtcctcaacactcacgggtgtgcggcaggcatgacattgatcgtagtcgccttcgctcaggtcgtggcgcacggtgacgcgattatcgaaaacaaagcagtcaccctgccatttggtttctgcctgcggcacctcttcgaggtacttcaggatgccgcccttgaggtggtagacctcatcgaaaccctcgctgagcatgtagctggaggccttctcgcaccgaatgccgccggtgcagaacatggcgaccttcttgtgcttggccgggtcgaagttggctttgatgtagtcgggaaattcgcgaaaactggtggttttcgggtcgattgcgccttcaaaggtgccgatcgacacttcgtagtcgttgcgagtgtcgatcaacagcacttccgggtcgctgatcagcgcgttccagtcctgcgggtcgacgtaggtgccgaccttcttgttcgggtcgacgccttcgacgcccagggtcacgatctctttcttgagcttgaccttggtgcggtagaacggctggtcgtcgcagtaggattctttgtggtcgatgtcgaccatccgcgggtcgttcttcagccaggccatcaagccatcaatgccttcgcggctgccggaaacggtgccgttgatgccttcttcggcgatcagcaaggtgcctttgatgccgttgtcgaccatcgcctgcagcagtggctcgcgcagggcgacgtaatcttcaagggtgacgaacttatacagtgccgccacgacaatcggttgagtcatgggtgttctctccaggtggctaccctcgtaaggggtgaaccggatgcaaaaaaaacgcgccggctaggcggcgcgttgcggattctaacaaatgcccggtgtcagagacacccgatcatcaatcatgcccgccggcgcaggtcggcgaggccggggctgcgtcgattttcgcccattcatcaggcgtgtaggtatgcagcgccagcgcatgaaactcgctcatcaggtcacccagggtggcgtagaccttctggtggcgcttgacgcggttgagcccctcgaactgcgggctgaccagcacggccttgaagtgggtctgcaagccacggctgtgcatgtggctttcatccagcacgctcaagtggtcggtgcccagggcggcaagcgccgtttcgatacgctgttgcatggtcattcctgcttacttcttcttggccggtgcggcggctttaggtgtcagctcgttggtcatgtcttccaacagcttgttcaccaccggcacggcgctttccagcttggcctgggtcatctgggccgattgctgggtcagttgcggcattttttccaggactttcttgcccagtggcgactggtagaaggcaaccaggtccttgagctcggattcgctgaagttggtggtgtagagcttgaccatgtccggcttcagcttcggccagccgatggcctggtcgagggcggcgttggccttggcctggtagctgtcgagtacggactgcttggcggcaggcgccttggtctgttcgaaacgctgggcgaacatttgctgcacttgcatgtacaccggggtacccagcttgtcggcatgggccagggtaaggaaggcttcggcactggcgttgtggctggcggtatcggcaagaacctggccgctggcgcaaaccagagcaaccgcggtacagatggcacgaagacgagtcatcgagtttccttttctagcaggcgaggtaagaccccaagggcgcccattctgcgcctaaaaaaccttggggctcaaccccgggccttgtcggacaaggattgcccgatgaaaagtctttcaggggaacccccaaggctgatcacagcctaaactgcgcaaacgaacctgaaggagtgtgcccgatgagccgtatcgaaaccgacagcctgggagaagtccacgtcccggatgacgcttactggggcgcccagacccaacgttcactggtgaacttcgccatcggcgagcagcgcatgcccctcgcggtattgcacgccctggccctggtcaagaaggcggcggcacgggtcaacgaccgcaatggcgacctgcccgcggacatcgcccgcctgatcgaacaggccgccgacgaagtgctggccggccagcacgacgaccagttccccctggtggtgtggcagaccggcagcggcacccagagcaacatgaacgccaacgaagtgatcgccggccgcgccaacgaactggcgggcaataagcgcggcggcaagagcccggtgcaccccaacgatcacgtcaaccgttcccagagctccaacgactgtttccccacggccatgagcatcgccgccgtgcaggcggtgcatcaacgcttgctaccggcgattgccagcctgtccggcgggctggcggagcaagccgccaaacatatgaagctggtgaagaccgggcgcacccacatgatggatgccacgccgatcaccttcggccaggagctttcggcattcatcgctcaactcgactacgccgaacgtgcgatccgcgccgccctgccagccgcatgcgagcttgcccagggcggcaccgccgtgggcaccgggctcaatgcgccccatggcttcggcgaggcgattgcctcggagctggcggcgctgtcgggcttgccgttcgtcaccgcgccgaacaaattcgccgctctctctggccatgagccgctggtgacgctgcacggtgcgctgaaaaccctggccgtggccctgatgaaaatcgccaatgacctgcgcctgctgggctccggcccgcgcaccgggctggccgaggtgaaattgccggccaacgaaccgggcagctcgatcatgccgggcaaggtcaacccgacacagtgcgaagcactgtcgatgctggcctgccaggtgctgggcaatgacgtgaccatcggcattgccgccagccagggccacttgcagttgaatgtgtacaagccggtgatcatccacaacctgctcgagtcgatccgactgctggccgacggctgcaacaacttccaggaacactgcgtggccgggctggagcccgacccggtgcagatggccgagcacctggagcgtgggttgatgctggtcaccgcgctcaacccgcacatcggctacgacaaatcggccgagatcgccaagaaggcctacgccgaagggttgacgctgcgggaggccgcgctggagctgggctacctcaccgatgcggagttcgaccagtgggttcgccccgaagacatgctgggcgcctagcctaggatgccatgcgcaaccgccgggccttgagcccggcgagcaacgacggcgccagcgccacggtcgccgagcccagcaccaccaccaacgccccggcatagcccagggcgttgatctcttcggcctgcacatagtcgggccacagccaggccgccagggccaccgccacaaaggtcaccaacggcgtgagtgccagggtcgcactgacccgtgaggcctcccaatgggccagcgcttcggcaaaggcgccgtaggccaccagggtattcatgcagcacccgagcaacagccagccttgcagcgggctcaggtccaatgcctccagcggatgcgcccaaggcgtaagcaatatggcgcaggacaggtagatcaccatcatcacctgcagcgagttccacaccgtcaacagttgtttctggccgagggcatagaacacccagatcgtggtggcgagcaggatggtcagcacgccggcggtgtaggcgccgagcgaggtcagcagttcttccaggcgctggttgaagaacaggccgaatcccaggatcagcaccaccaaccccaacccctgccccaggctgaagcgctccttgaagacgaacacactggcgaccatcaaaaagatcggccccatctgtaccaccaattgcgcagtgccggggctgagcaatttcaggcccaccaggtacagcacgtagttgcccaccagcccgcacaccgccatcgccaccagccagccgcccttggggccgagtaccttgcggctgggcagacgtttggtcagcgccaggtagatgaacaggcaactgccggccacgatcaggcgaaaccaggtgacggtgatcgggtccatcacctgcagcacctgcttgagtttgatcggcagaatgccccacaggaacgcggtcagcagggtcaggagaaaaccatagacccagcggccggaagagatgtgcatgagtaccccagaagccggaggaagtggagccgcattctaggggcacccgatgcactttgtgtagcgaacacttaacttgccgatcagcgcaccgcttcgaacaacccggtggcccccatgccgccgcccacgcacatggtgacgatgccgtaacgcaggttgcgtcgctgcaactcacgcaccaggtgccccacctgccgcgagccggtcatgccgaatggatgaccgatggaaatcgagccgccgttgacgttgtacttggcattgtcgatttccaggcgattgcgcgcatacaggcactgcgaggcgaacgcttcgttcagctcccagaggtcgatatccgccacctgcaagcccttggcctggagcaacttgggcaccgagaacaccgggccaatgcccatctcgtccggctcgcaaccggccacggtgaagccacggaaaaacgccttgggcttgagccccaacgccagggctttttccaggctcatcaccagggtcatcgaggcgccgtcggagagctgcgaggaattgcccgccgtcaccgagccatcttcggcaaacaccggcttcaaaccttgcagactcgccagggtagtgtccgggcggttgcagtcgtcacggtcaaccacgccatcaagaatctgcacttcaccggtgtgcttgtcctcgaccttgtacttgaccgccatcggcacgatttcatcgttgaacagcccatcggcctgggcctgggcggtgcgctgctggctttgcagggcgtacaggtcctgttcttcgcggctgacgttgtagcgacgcgcgacgatctcggcggtctggcccatgggaaaatagatacccggcacctgctctttgagcagcgggttgatcaggttgtcggtgttgacgcttttcatggtcaggctgatcgattcgacgccgccggcaacgatgatatcgctgcaacccgaagcaatctggttggccgcaatggcaatcgcctgcaagcccgacgagcagaaacggttgagagtcatgccggctacgccagtgcccagttgcgaaagcaccgccacattgcgcccgatgttgtaaccctgggcgccctcgttggagccggcgccgacgatgcaatcctccaccgtcgccggatcgataccgttgcgggtgagcagcgcgttgacgcaatgggccgccatgtcatccgggcgggtctggttgaacttgccgcgaaaggacttggccaggccggttcgcacgctgtcgacgatcactacttcacgcatgggctacctcgatcttgtggttgttggatcgagcatagatcccaccctgcgccatcgcgacgatcattcaccccatagatacaaaaccatggcggcccggctcaccgtggcgagcaggcttgccctgcgttggggcgcgaagcggccccgaatcaggcaccgcggttcttcaggcacgactgagttggcaggttttagggctgcttcgcagcccaacgcggggcaagcccgctcgccacaacgagctgcatcattatttctttttctttttgtcgtgcttgtcggacttggcgaacgcctcttccagcgccaggttgatcgtgcgcaacaccttgacccgcgcccagcgcttgtcattggcctccaccagggtccagggcgatacctcggtgctggtgcgatcgaccatatcgcctaccgccgcgcggtagtcgtcccatttgtcgcggttgcgccagtcgtcttcggtgatcttgaagcgtttgaaagggatttcctcgcgggcctggaagcgctccagttgcgtgtccttgtcgatggccagccagaacttgaccacgatcacaccggcatcgcgcagttgctcttcgaagtcattgatctcgccataggcgcgcatccagtcggcaggggtgcagaagccttcgatgcgctccaccagcacgcggccataccaggagcggtcgaacacggtgaacatgccgcgtgccggaatcttctgccagaaccgccataaataaggctgggcgcgctcgtcttcactgggcgcggcaatcggcacgatgtggtactgacgcgggtccaacgccgctgccacccggcggatcgccccacctttgcccgccgcgtcgttgccctcgaacaccgtgatcaaggcgtgcttgcgcatgcgcttgtcgcgcatcagtccggagaagcgtgcttgttcggtgatcagttgttcttcgtaatcgtccttgtccaggcgctgggacaggtcgaggctgtccaacaggctcttcttgtccaccgaggcgatcaagggcgccgggttcatgccgctggccttgcccttgggcagcttgagcgcattctgcaggccttcgagcaggagtttgcccacggtgaggctgcggtagttgctgtccacgccttcgatcacatgccacggcgcatagtcgcggctggtgcggcgcaacacgcgctcgccgaagtgcacgaatttgtcgtaagtctcggattgctgccagtccagcgggctgatgcgccagctgtgcagggggtcatcggccagggccttgagccgcgctttcatctgctttttggagaggtggaaccagaacttgaagatcagcgcgccttcatcgcagagcatcttttccaggcgttcggcgccggcgatggcctggtccaggcgggcgtccttgatctgcccatgtacacggctttgcagcatctggctgtaccagttgccaaagaagatacccatgcggcccttggcgggaagttggcgccagtagcgccaggccggcgggcgcgccagttcttcgtcggtctgctggtcgaaggtgcgcacttcgatcaggcgcgggtccatccattcattgagcagcttgaccgtctcgcccttgccggcgccttcgataccgttgatcaggataatcaccgggaagcgcttctgctgctgcaactcgtactgcacctccagcaaggcttctcgcaatgcaggcacttcggcctcaaaggtgtctttgtcgatggcgtgaccgatttcggcggattcgaacatgggcagctccgtttcaagatggctcaagactagcggattgggcaacaacacgcgggaggaaattccaccggcgcttgccgtgggtcaattcaacgtcggttgatcggctagaatgacggccttgtctttaccgagccgcccatgaaccctatcacccacgcccagctcgactgggatgaccaaggtcgcccgcactcgcgaatcttcgacgatgtgtacttttccgataagtcgggccttgaagaaacccgctatgtgttcctcgaacagaaccgcttgcaggagcgctttgccgcgctgcccgccggtgggcggctggtgattggtgagaccgggttcggcacggggttgaatttcctctgcgcctggcaactgttcgaacaacacgcggtagccggtgcgcgcctgcatttcgtcagcgtggaaaagtatccgctgagccatgccgacctgcgacgcgccctgctgctctggcccgaactgcaccccttcgccgaacaactgctggcgcaatacattgccatccatcagggcttccagcggctggtgctggataacggccgcgtgaccctgaccctgctgatcggcgatgccctggagcaactgccgcaactggatgcgcaaatcgacgcctggttcctggacggcttcgccccggcgaaaaacccggagatgtggaccgccgagctgtttgccgagctggcacgcctggcggcgccgggctcgaccatcagcacgtttaccagcaccggctgggtgcgtcggctgatcaacgccgccgggttcaagatgaaacgtacgccgggcattggccacaagtgggagatcctccgtggggagtttctcggttggccggccgacacaccggtaccggccgcgaccaagccgtggttcgccaggccgcccgcccttgcgggtgagcgtcacgcactggtgatcggcgccggcctggcgggctgcgcgacagcggccagcctggcggccaggggttggcaggtcagcctgctggagcgccatgacggtgtggcgcgggaagcctccggcaacccccagggcgtgctgtacctgaaactgtcggcccacggcacagccctgtcgcagttgatcgtggcggggtttggctacacccgccgggtgctggagcacctgcatcgcggcgtcgactgggacagttgcggcgtgctgcagctggccttcgacgccaaggaagcccaacgccaggcgcaactggccgctgctttcgcgccagacttgctgcacctgctcgaccgcgaccaggcccaggcccgcgccggtgtcgcgctggcgcacggtgggctgtttttccccgaaggcggctgggtgcacccaccggcattgtgcgaatggcaagcacaccagccgggcgtgaccctgctgccctaccacgatgtgctcgacctgcggcacgtcgacggtcagtggcaagcctgggacgctgagcgcctgctcgccagcgccagcgtggcgatcctggccggcgccgccgaggtccagcgcttcgccgacctgcccctcaagcgcattcgcgggcagatcacccgtttgccgcagaccgcctacagccaggccctggccacggtggtgtgcgccgaaggctacgtcgccccgccacgcctgggcgagcacaccctgggcgccagtttcgacttcaagagcgatgaccttacgcccaccgccgctgaacattccgggaacctggagctgctccagggcatttccgaagacctggcccagcgcctgggcgccgacagcctggcgccggaagccctggaaggccgcgccgcgttccgctgcaccagcccggactacctgccgattgtcgggccattggctgaccgccaggcgttcgaccaggcctacgccgcgctgcgcaaggacgcccggcaagtgcctggcgccgcctgcccgtggctggacgggttgtatgtcaacagcggccacggctcaagggggctgatcaccgccccgctgactgcggagctactcgccgcctggctggacaacgagccgctgccggtgccgcgcgcggtggctgacgcctgccaccccaaccgtttcgccgtgcgggcgctgatccgcaccaccaccggcaaggccgaatgatcaaccggccggggcctcacacacggggcccagcccttcggttctgatggcgtcctcggtcaagcgctcgatcagcacgctttcagcctgctcccgttcactgaggacggtgtgcatgcgactccggtaatcggcatcgctcagtaccaggctttgttcgaagatgtcattgaggcgctcatcatagggcgtgttcaaggcctcgaagcgagctgcatgggcacgcttgaggtagtcggtccagaacggcagcttcttgagatacgtcatcagctcgggggacagctcggccagcgtgacttcggccttggcttcatccagcgccaactgagtgacctcccccagccgcgaatagcgcatgtgtcgaggctggccgggcaaatagaattcgccgaccaggcctgtgcggaacgccaggctgacctccaatggatcggcggcaggatgcaggccactgtgacggcgcgcaatcgcctccaactgctccaggcgaaacaggccacgacccagtttcaacagcggcttgggcgtcagcgcacgcccctggatgagggccttggcatcgctgatttccaccaggacttccaggctgctgaagttgacggcggcggcatcgtcacaattgatcggcgtggcggcccggtcgaatacttcctcacgcagttcgctgttcattgcggcagcctccagcacccgccaaacgcgtcgctgcaggtcctcacgcacgaactcggcgtctttggtgccgcccagttccgcgagcaacttgaacagggcgtccgaccggtgatcgtccttgaggctcgtccacgtgagtttcttcgccgcatagcccgccatccgttcgtccgccagccacagttcgcgtgcgctctgctcgttcaagcgggcaatgtcatcttccaggaaccccatgcccggaccgtacgcctgacggtagtttttcagggccagttggctttgcgccgataacgggttgtgccgcaagttgacgccctgggcaacgtttcgcggcacgcgtagtagccactccggcagcacgctgatgtcattggcgcgcaaattgatatgttcaagataaggcaggcgccacaggtccctgggcagttccttgagtcggcagttgcgcaacaccaggctacgcagcgcgaacatacggctgatatccggcgggtccagcaacgggttgtccgccaggttcaacaccttcaggcgcgtcagatcggccagcttggcacgggtgtattcggtgagctggagtttgttgttgctcaggtacaaccgctccaggcccggcatgtgcaacagggcttcaggtagccgggtcatctggttttcgcctagttcaagggtgcgcagccccttgaagtggctgaggaaatacgccacatcgtcagtcaggttcaaacggcgcagtgacaaatgctcgacgtgatcgaaacgcacctgtgcgggcaatgtcggcagagggccgatgaccatatcatcgagcaacagcccaggaacctggctggcgtgctcatcgggcagggtcgacatccgtcgccagcacttttcgatgctcttcgccgcctggtggcggctcaatcgatagtcccacagggggtcggcctgcacgatattgacagacttctcggcacgccagcgtttgagtgccgtgtgcagcgcttcaaactcctgctcgcgtgcctggaccgccttggcacgcgacagatgatcatggcccgcatcgcgcaggaaatcgttgacctgcgacggactgagcaagggatagagtttgttgactttacgcaccaacgccgccgggaaatgctctgcctcggctcgcgccgcctgggtacagatcagcggctcttcgtccagcagcccgcgttccggccacaggtaacgggcgaccctgtcacgctcatgcaccgcggtagcacgcaggcggccgcgcaggtcggccgcctcgttctcggcctgaagcttcaatgcaatgcgctggcgtggcagcaggctatcgaaaagcgccgtgtacaagccgtccgcgcctgtcgcgaccggcccgagggccttgcctttttgatcgaatgcctgatacccctggggcgtactgaccagggtcctctgcgttgcagctgttgacgcgcccgcctcggccagcacctccccgctcagggtttgcctgcgcacctgcaacgccaggtctcggggccagccgggcatttgctgcagcataccgacggccacgcgtcgggtgccgtcccccgccaattccggccagtacaggcccatcagtgcgcggtcctgctccaacaggtccaccgtctcgcgcgcccgctgggcaagcaccagcggtacctggccggtggtgcgcaaataccggcgctcccataatgtggcctgtgagtacagctcccacgccatgcggggcggcagttgtttgaagcgctcgcacaacggcaccaattcgttcagggcaacaccggcgtaataggtgtacaaatggtcgaacacggcttgatgccggctacgcagcgtgtccagcagacgacgctccagcgtactgcgcatgtcgtcttccgccacacccttgcccaacaggtcgccacgttcctcgtcgctcaagtgctccagcaaggtgtccatgacccgcccgtccctcaactccttgcgggtgatatggatgctcaggtcctcataatcgaaaggtgctgtttccggatgcctttccagcagttcgccctcctcgtccagcacctcgaaaaaacgcccttggggccagcctggcaccagcggcaatgcaaacaattgcgcgcgtgcggtactcgcatcgggacgttcaccacgctccaggtactccatcagctcacgaaccctgtcgttttgcttatagcgcagcactgcgtcatgaaaacgctcgggtaacggctcgtaggcactgcccaacgcctgcaggtgtggcagggtcattcctgtgagggtcgccaggttcgacaatggctcagcgggcaattcgtcaaggcttggatccagtcgcctgaggctgtagacggggtcttcccattgcaaggggcgctcgtagacatgctgccagccaccacggaagttgtgctccagcggcgggcgataagcctgcggacgccgtggatggatgacccgccacttctgcaatcgggtatcgaacgcaaccgaatagtggtttccccccatgcggatgtaggagcggccgttgacttggtacacccctcgagaactggccacggcctggcgtgcgaccggctcaggctgtcgataggcattgagccttggccgccagagtttctggccctgatcggcagtgttgacggcttcgaacttctcgaagaactgcgcagacgttgtcagggtgcgcttcaacgtccccactacccgcccgcccgccacgaacaacgccatggccgcgatattttcagccacattcaccagatgcttgagggcctcggtatgctcatcgtgctgccagtcctcgacggcctcgaacacttcacccaacagctgtccgacggcgaccccgagcatcaactgccccaacaccggcaccaccaacgacgccacattcagcaggtccagccccaggtccagatagcgctgcatgcgctcttcactggcttgctggtcgacctgggccttgggtaccgccagtaccagcgcgtccaactgtatcttgccgacaaatgcctgaaagaagaacccggtcaggctggtcgtgacgggtaaggcacgcagctggccaaccttgcgcgtcatgtcgaacgagtcgaaaaaatccaggcggttgccctcatccacgtacccttcgaaaaacgtccggtagctcttgatttgcagcttcaaggacaaatacaccttgaagtcttccagcgtcggatactcgtaccagggcctggagggctcgttcggcatgtagacaataaaggggccggtatccaggctgcccggtgcgctgtcggaaaacaccaatacactccacacgcaggtgccatcgatgttcaagccctgccaattgatcaggccgttgcccggcagcctgctcctgagttcactggccggacgatcgaacccgatcagcttgagcaaccgcgcgtaggtcccggcttcgatatgccccttgcacaaggcaatatgcagatccatgcgcatgtccatgagtttgcccaggccaatactgacggcaacctggttgtaggagctgacttcctctttgcttttcgggtcgggcaggtcgaagacctcttcgatgtgcttttgatagagcgcccccaggtccagctcccggcaatgaccgacaaattcaggcaccgtcatccccaccatcggctgcctggtggccgcagagcgcactacagctgcgacggacatgcccccgggctcagcgcgctctgcagagaaattctgcatcgccgcatgcagcaggctttgcttggtataggtaacggtctggagcaagccgccgcccaggtccgggctcaccccagtgagcttgcgcctgggcaactccagcaggtctcgcctgacatccggcgactccacccctttggcccgcagaaaattggtcaagcgctctgcgcagtattgatccagcggttccaggcggctcaacaggtaacggacattctcacgaatcaccttgctgtcgatatgcgtctgttcaagggcggtgagtgtcgaagcgtcggcttcaaccaaccagtgcggcacggttttgcgcaaaacctgcgccttgtccaggtcggcggtgatgtcgagcaatgccctgtccagttcatcttgagtcgctcctgcggcgacctcactcaaatcgcgtttttgcgtcatcggcatgtttcctcagccagctgaacatgaagccaaacgataagcctggaccgggccgcatccgggtatctgtctaccgccctgcaaccaccttcatccgcttataaccgattgatctaaaactccacgaatagccccgtgtcagtttctgggtacgcgccctgtcgggcgtattgagttttatgctccccaacggaaaaaccggtaaggaatttatgtgcggattagctggagaattacgtttcgatgcccaacctgccgacctggcagcgattgaacgcatcacccatcacctggccccgcgaggcccagacgcctggggctttcatgcccaggggccgatagccctgggccatcggcgcctgaaaatcatggacctgtcggacggttcagcccaaccgatggtcgattcgcacctgggcctgagcctggcgttcaacggcgcgatctataacttcccggaattgcgagaagagctggaagccctgggctacgccttctattccggcggcgacaccgaggtgctgctcaagggttatcacgcctggggcgaggcactgctgcccaagctcaacggcatgtttgccttcgcgatctgggaacgcgatgcccagcgcctgttcatcgcccgcgaccgcctcggcgtgaagccgttgtacctgtcgcgcaccggtcagcgcctgcgctttgcctcggccttgccggcgctgctcaagggcggcgatatcaacccgatcctcgatccggtggcgctcaaccattatttgaatttccacgccgtggtaccggcgccacgcaccttgctggcgggcattgaaaaactgccacccgcgagctggatgcgcatcgatgccagcggcaagaccgagcagaagacctggtggaccctgccctacggcccacgcgaagatgaaaaaaacctgagcctggaagactggaccgaccgcgtgctcgatagcacccgcgaagccgtggccatccgtcaacgtgctgcggtggatgtgggggtgctgctctccggtggtgtcgattcgagcatgctcgtcggcctgctgcgtgaagtcggcgtacaggatttgtcgaccttctccatcggctttgaagacgccggtggcgaagccggcaacgagttccaatactcggacctgatcgccaagcactacggcacgcgccaccaccaattgcgcattgccgaaagcgagatcatcgagcaactgccggcggccttccgcgccatgagcgagccgatggtcagccatgactgcattgccttctacctgctgtcgcgggaagtggccaagcattgcaaggtggtgcagagcggccagggcgccgatgagctattcgccggttaccactggtacccgcaggtggacggtgcggccgatccctatgcagcctatcgcgatgcatttttcgaccgcagctacgacgactatgccgccactgtcgcgcccaaatggctgaccgccaacgatgcggcgggcgacttcgtgcgcgaacatttcgccatgcccggcgccgatgcggcggtggacaaggccctgcgcctggacagcacggtgatgctggtggacgacccggtcaaacgtgtcgacaacatgaccatggcctggggcctggaagcacgcacgccgtttctcgactaccgcttggtcgagctctcggcccgcgtgccgggtaagttcaagctgcccgacggcggcaagcaagtgctcaaggaagcggcgcgccgggtcatcccgagcgaagtcatcgaccgcaagaaaggctacttcccggtgccgggcctcaagcacttgcagggcgataccttgaactgggtacgcgaactgttgctcgacccgagccaggatcgcggcctgttcaactccgccgcgctggaccgcttgttgaccgacccgcagggccaactgacgccgttgcgtggctccaaactgtggcaactggcagcgctgaacctgtggctcagcgaacaaggaatctgattgatgaaacctctcgcagcggcctatagccaacgcttgctcaagggccaggcgccgacctacgagcgcctgcaggcgcgcctggcggaagacggcagccccctgggcgccgagccgattgcggtgcattgcggctggggccggttgttgatcgggcataccttccccgacccggccagcctggcccaggaactgctccatgagcagccgggtgagcgtgatatcgcgttgtatgtggcggcgccccagcagatcctggggattgatccccagcagctgtttctcgacccctccgacacgctgcgcctgtggttcagcgactatcgcccggctacccgggtgtttcgcggcttccgtattcgacgggtgcagaccgaggccgattggctggcggtgaatcagctgtaccaggggcgcggcatgctgccggtcgacgccgaacgcctcacaccgcgccatcaaggcggcccggtgtactggctggcagaagacgaagacagcggcgcggtgatcggcagcgtgatgggcctgaatcaccagaaggcgtttcatgacccggaaaacggttgcagcctgtggtgcctggcggtcgacccgcaatgcacgcgacccggcgtgggcgaagtgctggtgcgccatctggtggagcatttcatgagccgtggcctgagctacctggacctgtcggtgctgcacgataaccgccaggccaagaacctttacgccaaactcggtttccgcgcgctgaccacctttgcgatcaaacgcaagaatgggatcaaccagccattgttcctcggccctggcccgcaggcggggttcaacccctatgcgcggatcattgtcgaggaggcccaccggcgcggtatcgatgtgcaggtggatgacgccgatgccggcttgttcacattgagccatggcgggcgacgtgtgcgttgccgtgagtcgttgagcgacctgaccagcgctatcagcatgaccctgtgccaggacaaaagcctgacgcacaaggtgttgaaggccgccggattgaaactgcccgcgcagcaactggcgggcagcgcggatgacaacctggagttcctcgatgtgcaccagcgcatcgtggtcaagccgctggatggcgagcaaggccagggtgtggcagtggatttgcagagtatcgaggaggtgcagcaagccattgaagcggcgcggcaattcgacagccgtgtgttgctggagagtttccaccaggggctggacctgcgcatcctggtgatcggcttcgaggtggtggccgccgcgatccgccgcccggcggaggtgactggtgatggtcatcattccatcggtgcgctgatcgaagcccagagccgccgccgccaggctgcgaccgatggtgaaagcaaaatccccctggatggcgaaaccgaacgcacgctgaaagccgctggctatgactacagcagcatcctgccccgtggccaggtcctgtccgtgcgccgcaccgctaacctgcacaccggcggctgcctggaagacgtcaccgccatcctgcaccccacgctggtggacgccgccgtgcgcgccgcccgcgccctggacatccccatggtgggcctggacctgatggtgcccgccgccgaccaacccgagtacgtgtttatcgaagccaacgaacgggccggcctggccaatcatgaaccgcaaccgaccgcggagaaatttgtggatttgttgtttccccatagctgaacgatccgaccttaggagtctttatgagccgaaccatccccgaaccggatctgaactacctgcaaaaagtgctgctggaaatgctcgccattcccagccccaccgggtttaccgacaccatcgtgcgctacgtcgccgagcgcctggaagaactgggcatcccctttgaaatgacccggcgcggcaccatccgcgccaccctcaagggccagaaaaacagccccgaccgtgcagtttcggcacacttggataccatcggcgccgccgtgcgcgccatcaaggacaacggccgcctgagcctggcgccggtaggctgctggtcgagccgctttgccgaaggcagccgcgtcagcctgtttaccgacaacggcgtgatccgtggcagcgtgctgccgctgatggcctccgggcatgcgttcaataccgctgtggatgaaatgccggtgagctgggaccatgtggagttgcgcctggacgcctactgcgcgacccgtgctgactgcgactccctggggattggcatcggtgactatgtcgccttcgacccactgccggaattcaccgagagcgggcacatcagcgcccgacacctggacgacaaagccggcgtcgcggcgttgctggccgcactcaaggccatcgtcgacagcggcgagccgttgctgatcgactgccacccgctgttcaccatcaccgaggaaaccggcagtggcgcagcggccgccctgccctgggacgtcagtgagttcgtcggcatcgatatcgcgccggtcgcccccggccagcactccagcgagcatgcggtgagcgtggcgatgcaggattccggcgggccgtatgactatcacctgtcgcggcatttgctgcgcctggcgtccgaccacgagttgccggtgcgccgcgacctgttccgctactacttcagcgacgcccactcggctgtcaccgccggccacgatatccgcaccgcgttgctggcgtttgggtgcgatgcgacccacggctacgaacgcacgcatatcgacagcctggcggcgctgagtcgtctattgggcgcctacattctcagcccgcccgtgttcgccagcgatgcacagccggcacagggttccctggaccggttcagtcaccagatcgagcacgagacgcagatggagagcgacacgcgagtgccgtcggtggacagcctggtgggcaacaagtcctgagactggcaactacggtcccggcgcagtaggatcgccgggatccatcacccgaggcttgtatgctgattccctacgatgcacttgaagtcgagacgctgacgcgcctgatcgaagacttcgtgacccgcgacggcaccgacaatggcgacgacacgcccctggaaacccgcgtgctgcgcgtgcgccaggcgctgaccaagggccaggcgctgatcgtgttcgacccggaaagcgagcagtgccagttgatgctcaagcacgacgtgcccaagcatctgttcgactgacgtcagagattgggcaccggcaccggatgggtgctggggtcctggcgatcgcggattttctgatgcacctccgcgcgatgcacatgcaccccggccggcgcttcaacgccgagtttcacctgggtaccgttcaactcgaggatatgcacggcgatgtcatcgccgatggagatgacttcgcctatggcgcggcttaagaccagcatggcggttgtccttttaacagtgaaaggacctcgaccatgcgcgcaggctgtgctgcgcatcaatggcttgccgtgaaatcaggcactacttacatgtgtaggtaaaatacctgacagaccactacccgatcagcccttggcagcctgtgccttggcgcgcattttgtcggccatgctggtcatttcgtcatacagcaattgcgggttcttctgcttcaacgcccatgccatgcgcccctgctcgtggggcaggatcatgaactcgccctccgcgacccgctgatagatgtagtcggcgatatccgccgccgaaatcggcgagctttccagcagcttgcccacctgggccttcatggcgggggtcggcccacggaacgaatccaggagattggtctggaagaacgatgggcacaccacatgcacaccgatttcctgctgcttgagttccaccagcagactctccgacaacgccaccacaccggccttggccacgttgtagttactcatggccggcccctgcatcagtgcagccatggaggcgatgttgatgatgcggcccttgctcttttccagcagcggcaggaacgccttgcagcccttgaccacgcccatcaggttgattgcgatctgccagtcccagtcctccagggacaactcggcaaagaagccgcctgacgccacgcccgcgttgttgacgatcacatcgataccaccgagcttgacctcacaggcctgggcgaatgcggtgagctggctgtagtcgcgcacgtcgcagcgctggataaaaccttcgccaccggcctcgcgcaccaacctgagggtttcttgcaggccgggctcgctgacatccgacaaggccaactgccaaccctcacgggcccagcgcagagcgatttcacgacccaggccggacccggcgccagtgatcatcatgcgattttgcataggaagctgccttgtggttcacggaagaagtgatcggcagtgtagcgaaggtttttcctgcccccatccaccatcagagtgatgaatgcccctggcaaaccgtgggccgggtcggatgtttgcgtatagcctaagttcaatatttttcaactaataggttttagttgcgagcgcattaaaagaaataagcacgtttgcgaaatgctttaaaaaaatactgaattttctgcgaggggccatagtcggagttgttaaggcgtctgtctttaatatgcgggcctatcgttaaacaaccggtctttgcagaaggccaataaggaaaaaaaccatgagcctcattctgatcattatcctgatcctgctgctggtcggcggtttgccagtgttccctcactcacgcaactggggttacggcccgtcgggtatcctgggcgttgtcctggtggtgctgctggtactgttgttgcttgggcgtatataaacgccaggcaaaaaaaagaggccctttaaagggcctcttttttatggccgattaattagtccggcttgccgttgactacacccgcggtgttatccaacagactcttggtggccgtctgcaggaacgactcaagtttctgcttcagcgccgcctcgtccggcgactcggggattactttaccggtcgggttggcgcccagttcgtattcccacaacttcggtggcatttccttcggcagcaccagaatgcggtctgcggtcaccaacgccacggtctgatcgctgcccgatggcttgatcacgccaaaacccttatcgccttccggcaggttcaacaggtcacggccccagcactggtgcagggtatcgccaccaaggcggcccatgatggttggcacgatgtcgatctgggtgcccacggtgtggtcacgctcgccgaacttttcctgcatgcctggcgcgatcatcagcatcggcacgttgaaacggcccaggtccatttcggtgatctgctgctcgttgccgaagccatggtcacccacgatcacgaacagggtttccttgaagtacggctccttgcgggccttctcaaagaactggcccaatgcccagtcggagtagcgcatggcagtcaaatgctcgttgaggctgccacggtcggtgactttctctaccggcaatggcgtcggcaacgcatacggcgtgtggttggacagggtttgcagcaacgcatagaacggcttgccgccttcacgcgccttgagctcttccaggccacggttgaacatatcctggtcggacacgccccacgtcgggtcggagaacaccgggtcgacgaagtcattgcgaccgatgaagttggtcatgccctggttgctgaagaagcccgactggttgtcccaggcgaaatcgccgttgtacacatacacgtcgtcaaacttgcgcgcgctgagcaactgcggcaggcccgacagcttgtgggtgccttcgggggtctgcatcaggtattcgaagcccggcaggttcgggaagcacgccatggtggcgaacatgccctggtgggtatgggtgccgttggagaagaaacggtcgaacagcaggccttccttggacagtttgtcgaagtacggcgtgatgttgcctggacgacccaaggcgccgaccgagtgaccggcgaagctctccatgaggatcacgaccacgttcttgatcggcagggtcttctcggccggcggcatgtagtcgcggcgcacggcagcgatgtcggtatccaccagcttctcttgcggcagcaccagcatgtcacgcacggtctgggtagccagcggctggtcgagggtggccttccagatgttggaacggtcttcgccgaagcgggccttggccgccgcaatcagtgacaaggtgccattgaggcccaactggttggcgaagttggagtcggtggtgtacacatcaccccaacgcagtggcgggccttggcgcagggtgccacggatggcgaccacggcgatcagcaggcagaccacgaacaccgcgatacgcgtgtaccaaggcgccacctggcgcgtgccgatgctgccaccgctgaacgggccacgcggacgtgtggcgcggtcggcgcctttgaacgccatgctcaggatcaacgtacccacggcccaggccagcaggtagcgcaccaccggaaaaccgtaccagagcatgctcatcacggtcttggggtcttccttcacatactggaagaccaggccgttgaggcgctggtggaactcgcggtagaagtccatctccatcaggcccaggaacagggcaatgctggacgcgacggtcagccacagacggaagaacccacgcgcggccatggcgcggacgctgaacaaggccagcagcagcgggaccaacgcgtacatcacgaagcggatgtcaaagcgcgtgccattgccgaacgcttcgaggaaggtcgaggccggcgtgtcgaggatcatttcgcggttgtacaccagcagcgccaggcgcagcagggagaacatcaccatcatgaccagtgcgcagagcagcgtgtacgccagatgggatttgacggtcggttgcagcaggcgattagaagctcgctgctgactcagggcgtccgggtttgccatgtcgtttcaggacccattggaagtttaagtgacgaagtagtgcagtggcgcgaatggtgcccgatcaacggcggcaaggctattaattactgaacgtgcaccggcgctccgcctttagcggctcttgggatagggccttggcaggaagataaagccggcgaattgtcttggacgggatgtgaaaattttgtgcagcgaatatttcgaaacacaaaatgaattgaagggaaaagccatggcctggcagctgtcgagccggggttcgacagctgccaggccgggcgcgcgatcagatccgcacattaccccgtggcccggcaatcgcccagatgatcaggcccagcaccggcagcagcaggatcaacaggatccacaacaccttggcgcccgtgcttgcgccgcttttgaacacgttgatgatcgcccagatatccagcgcgaggatgatcagcccgatcaagctattgaacgtggaacccatggtgtcgctcctaagtgagggcatgcccttgtaggatagtcagccctggcgggggttccgttttatttcagacgtgaacggcgactttcagcgcttccagggacggttcgcccttgatgcccacttcagcgcacagctccagcacgcgcggcaggtcgttgccgtagaccagcaccgcctggatttcgtcatcgagcaactggctgaagttgagcaatacgtagccgccatcctcggggctgagggcgctcatctggatctggatgcggttgagtgcggtcaggtcttcggtcttggccagttgcttgggcttgaggttgaacgccacgccggggccgaacgacgcgacgatctgcgcgaacaggtcaccataggtgtcggcctggaacagtacggtgtccggcaggctgccgaccaccacccactcaccgagtgggatggggaaggtgtcgtcgtagttgatatccgggttggccgccagaaacgcggccgggtcggcgtaagcctgggccgcttcatcggcgatgcgcgccacctcgtcctcgcccatgacgccggcgctgattttgctgatgagttcgacgagggcggttttcatggaaatgatcctgtagcgggctggcttttgagggcgcgtagcctacaccagtttctgcaactgcgccgccgtatccaccgcgcccatggtctgcgcggcagccagtgcggtggcgccattggcgtcggtggccttggggttggcgccctgccccagcaggtaatcgaccatcgcaacgcggttgaacatcgccgccatcatcaacgccgtacggccgtcggcagacgcggcatccaccggcgcgcccccttcgatcagcgccttgaccacgtccaggttgcccttgaacgctgcaccagccatcggcagctgattcttgtcgttggcgatctgcggatcggccttgaactccagcagcacttttaccgcctcggcgtggccgtggtaggccgcgagcatcagcagggtgtcgccgttatggttgcgaaagttggccggcaagcctttggccagcagcgcagcgagcatggcggcgtcgcctttacgggcaacgtcgaagacctgttcggcaaattcggcagcttcgtcttcggtcatttgtttggcttggtctgacatgtggggctccttgtctggtgctttatatggcgcccagtgtcgcgagggagttcccccctgtcatggcttttttgtcaaaagcggccataggcagaatcaatagcgctcctttaatagcggaaatgcccaccctggatctgcgccagcaactgcccggtgaccggcacataactgtccgaccccggcagccaggcatagaccgggtcattgccggccttgtccgggtcgaaggcttcctccttgagccgcaccttctggtatttgaaggtgccggtggtttccatcttcaccttgatccgcaggaacaacggcacggcatagtgcggcaactgaccatgagcgaactgcagcaactcgcgcatgtccagggcagccagcgattcgctcggggtgatggcgaccataccggcgcggccattggtgttttcgatttccacgccataggccacgacttcagcgatctgcgggtgttgcagcaggatgttttccacttcggtggtcgagacgttttctcccttccagcgataggtatcgcccaggcggtcgacaaactgtgcatggccgaagccgatgctgcgcaccaggtcgccggtattaaagtagcggtcgcccttctcgaacacatccgtgaggatcaccttgcggtttttctccgggtcggtgtaaccgtcatagggagacttttcatcgatcctggccagcaacaagccctgcccgccggtcttcactttgtgcatgaagccatcgctgccacggatcggctcaccgctgtcgtgggcgtagtccaccaacgcccagtgctgcaggcaaaagccgacggtgttgtcgaaattcaatatgttggtgaaaccgatattgccgtcgctggcggcgtacaactcgcagacatgctccacgccgtaacgcgccttgaactgtgcccacacaccggggcgcaggccattgccaaccatcttggtcacgcggtggtcacggtcgtttccggtggccggctgatcgagcagatagcggcacaattcgccgacataaccgagggtggtcgctttgaatttgcgcgcatcctcccagaactggctggcgctgaacttgcgccggatagcgaacccggacgcgccgacaatcgccgagccccagcagacgcagaggccggtggcgtgatacagcggcagggtgcaataaagaacatcctccggccccatgtccagcgcaatgctgccgaagctgaccgcggtcttggtccagcggccatgtttcatgatgccggccttgggcagcccggtggtgccggaggtatagatatagaagcaggggtcgttgaagaaaatctgcgcggtactcggcgggttgtccaccgggcatccggcgctggctgccatcaggtcacagtaaccgtcgggcagcgcattgacctgctggtccgcgacaaaccaggtccgttccacaggaatgctcacctgctcacgtaccgcgtcataagaagccactaattctgcaccggccacaatcgccaccgggttcaccaggttgaggctgtgcagcagcgccgcctgggtttgcgcggtattgagcatcgcgcagatgccgcccagcttggccacggccagtacgctcagcagcaactcgggacggttttcaataaagatcgccactacgtcgcccttgccgatgccttgggcttgcagatggtgggccatgcggttggcctgttggttggcttcgctgtagctgactacgcggtcgccgtacaacaaggccgtgccatgcgggttacgcagggtggcttgttcaaaatgccagcccaggccacagggctgcgcggggtcggtgacattggcggcccgcatgccgcgcaccacgcgtggcaaagcgcgaacaatggccggcaccttccgcagcatcatgccccaggtgatcatgtcgttttgcgcgtggctcatgggaacatcctttttcttattgtgcgtaaaccttgcagaaaagtacgtcaggccctcttcggctgtacacgcaggatttgaaaagttttgtatcccgataagcgagcgctgaaaaaaggaatttagccaggcagagggagtctttatgagtaatggcctgcatgctcgaccctgccaagcaacgcaaaatgcaggatgcatgatggccattcatgcaaattgcacgaattcgaaaatttagaatttttataaactattgatttataacgatatttatttaaatcactagctggcacaatcactgcacctatctctccatgcttgccaacttgagccaacggagctgatagacatgagcctgatccaagataaattcgcttcagtattctccaactacgatgtcaccacccagcctcgtccagatggcggcatcctgctgaccctgcgcaacagcgagggtaaacaggtcaagcgttcgatctcataccagcaattgcacactgccgaccagctgacatgggttatcagcgccattcgccgcgacctggcagaacaggccagcgagctgccgcagatttcgatgctgcaaagccagaaccgctttgccttgccgacctaccactcggcttaagctccagatacccaaaagggccgcgacgcctctagcgtcgcggccctttttcatgggttcaacacagcccttgtcggctggcttcgttgacggcctgtacccgattggtcacttccagcttgcagtagatattgcgcaggtggaacttcacggttgcttcggacgtggcgcgtatctggctgatctcccagacggtcttgccttccgaagcccagcgcaggatttccaactccgccggggtcagggccttgcccgctaggttcagacgtcgcctgattgcattgggcagcgaatacggcggtagatacgattccttggggccgctcattagatcctctcctttttctggctcatgccgcaccaccttcttcggattcctcctattgacaggtgacataaacattgatgccgcagagggttacataacgaatggtattaaggcgcaggcccgcgcataaacatccgggccttacagaagtttaagtttcttcccacagcaacttccaaccttcaggggttgtagtttttgataggtggggattagtcgtcgaggccggggaaacgactggcaatatcgtcctcggtgaactccggtatacattcttcagccgtactgcacaggcgcagcgtgacgaagtgcgggttctcacccatatcaatccagtgcgccataccggccgggatcaccagcaggtcgtttttctcacagcgcacggcgtatacgtaatcgcctatgtgcagggaaaacagcccctggccagcaatgatgaaccgcgcggtatcttcgctgtagcggcgctcagcaagaaaacccgcacgcacttcggccttctggagatgatcctccgtcaccttgagcacccgcgcatctgcgtagcccaaggcctgaatctgcgccttgtacgccgcaatcaattgcgcatctgtggcccccttctcgatggggacaggctgccaacgctcaaaacgcacgccgtgttcggccagggtcgcagcaatatcctcgtagtgggtgaggaccttgttcggggtgtccggtgaagcaacggagtagacggcgacatagctcattgaagggttccttggttctgctcgtgcaatcgaagaccgatgataagggcggcggccagggccgcgacgctcgcgatgctgaacgtcagggtcggccccaacaggttccagctgtagccggcatacagcgcacccagcgcaccgccggtaccggccagggcggcgtagagcgcctggccctggccttgttgccggtcaccaaaactgcgttgcacaaaggcaatcgaggccgcatgaaagctgccgaacgtggcggcgtgcatcacctgcgccagcaacagcacccagaaatactcggcaaacgaccctagcagcaaccagcgcagcgccgccaacaggaaactcgccagcagtacccgacgtaccgaaaagcgcgtgaggatgcggctcatgccgaggaacatcaacacttccgccacgacccccagggcccacagcatgccgatcacaccgcggctgtaacccaggtgttccaggtgcagcgtcagaaaggtgtaatacggaccgtggctcagttgcatcaatgccacgcaggcataaaacgccagcacgccggggctgcgcaattgcttgaggaagccgtcgcccaccagacgattgccgtgggtggtgggctgcgcattcggcacccacaggctggcgccgataatgcccgccatgatcaccacgaccaccaccgggtagatgtccaggctcagccagtcgaacaggcggcccatgatcaccacggtgaggataaacccgatggaaccccacaggcggatctggctgtagcgcgccgtctgcttttgcaggtgcgcaagggtgatcacttcaaactgcggcagtaccgcgtgccagaagaacgcatgcagcgccatgaccagggccagccaggcgtaggtgtggctgacgaagatcagcgaaaaactcgccagggtgcataccgcaccaaaacgcacgatggccaggcgccggccggtgtaatcgcccagccagccccacaggttgggcgccacgcagcgcatcagcatgggaatggccaccagctcgccgatgcgcgcgctggagaaccccaggtgatcgaagtacagcgccaggaacggcgcagtcgcccccaggagggcgaagtagaacaggtagaagctggagaggcgccagtatgggagagatgaggtcatgctagatggggctgcttcgcagcccagcgcgagcaagctcgctcaccacagtcacagctggcccagcaccggcgtactcacgcgcacatcggcgttttgcccgcgattgcgcaacaggtggtccatcaacacgatggccatcatcgcttcggcgatcggcgtggcgcggatgccgacgcacgggtcgtggcggcctttggtgatcacatccaccgggttgccgtgcacatcgatggaacggcccggcgtggtgatgctcgacgtggccttgagcgccaggtgcgccacgatcggctggcccgaggaaataccgccgaggatgccgcccgcgttgttgctgaggaaaccttgcggggtcagttcgtcgcggtgctcggtgccacgctgggacacacaggcaaaaccggcgccgatttcaacgcctttgaccgcgttgatgctcatcagcgcatgggcgagttccgcatccaggcggtcgaagatcggttcgcccaggcccggcttcacgccctcggccaccacggtgatcctggcgccgacggaatcctggtcgcggcgcaactggtccatataggcttccagttccggcaccttgtccgggtccgggctgaagaaggcgttgccctcgacgctgtcccaggtcttgaacgggatttcaatcgggcccagttggctcatgtagccacggatcacgatgccctgggtggccaggtatttcttggcgatggcaccggcggccacacgcatggcggtttcgcgggcagaactgcggccgccgccacggtagtcgcgctcgccgtatttgtggtggtaggtgtagtcggcgtgagccgggcggaacaggtccttgatcgccgagtagtccttggacttctggtcggtgttgcggatcagcaggccgatggagcagccggtggtgcggccttcgaacaccccggagaggatctcgacttcgtcgggctcctggcgctgggtggtgtggcggctggtgccgggcttgcggcggtcgaggtcacgctgcaggtcttccagggacagctcgaggcctggcgggcagccgtcgacaatggcgaccaacgccgggccatggctttcgcccgcggtggtgacagtgaacagcttgccgaaggtattgccggacatgcagggcgctccgtgaaatcagttgaatcaagtcaaccgtaataacttaaggcggccagtatacgcaggctaaccgagtagttcatcctcgaaaccttaccggtagaccttggtccaaccggcaccttcctcatgatggcgcgatgatgctgcgagttctgcttttgaccctcaccctgttttccagtgttggcttcgccgcctcccctgtcgtgctgcaaaggcccatcagcctggacaccggcagtggcgagctgtttggctcactcttgttgcccaaatccgataagccagtcccggttgtactgatcatccctggctccggccctaccgaccgcaacggcaacagtgccgacggcgcgcgcaacgacagtctcaagcgcctggcctgggtgctggcgcggcacaacattgccagcgtgcgctacgacaagcgcggcgtcgcggccagcctggcggccacgccggatgagcgcaacctgaccctggatgcctacgtggccgatgccgtggcctggggcaagctgctcaaggccgacacacgcctgggcccgttgattgtgctgggtcacagcgaaggtgccttggtcgcggctctcgccgcgccgcaactggacccggccggcgtcatttcgttgtccggcagcgcacgcccggtggaccaggtgatccgccagcagttggccgatcacctgccccctgccctgttgctgcgcagcaacgagatcctcgatcacctcaaggccggccaggtggatgctgatgtacccggcccgctggaaggcattttccgccccagtgtgcagccgtacctgatcagcctgttccgtgccgacccttcggccgcgttcgcccagttgcgcatgcccgcgctgatcatccagggcaccaacgatatccaggtgggtgtgggcgacgcccagcaattgaaaaaggccaagcccgacgcacagctggcggtgatcgaaggcatgaaccacgtgatgcgcatcgtgcccaacgacgtgaagcagcaattggcctcgtacaacgatccgcaactgccccttgccgccgagctgggcagccgcgtcgtgcgctttatcgacggacttcaaccccgttaagcgacaatttgtctccagtcctgggaaaaacggccgataagccctgggtcgacagcaaaaagactgtcggctcgctgggcttggacaggatcgcgccgcatgacaaccactgaagcaacaccggaatccaccgccgataccccggctgaaaaaaccgaggccgtcgacgcggcgcccttgccgtgggcggaggtccaggccgagcatttcaagatgctgcgcctggcgcccctggccaccgaccgcgccaccggcgtgcgaccgttgcgcttcgtgcagtttggctacgccgagcgcaatgacaaacaccacagcctgctgcgcatggtgatccagctgccagggcagcgcgtgcgccgtgagcagaaccacctggacatctgggtcgaccacgacaagcaccgcgtgcacttcggcccgggcaacagcctggaaatcgaaccggccaaccggggtatcggtcgcttcctggtggcccagggcgccgcgtgggcgaagaagaagtggtcacactaccgcgtcgacggcgtcgacctggccaacaaagatgcgttgaacgaggccacccgcctacgccgtgatcacttcctgcgcatccagggctttgatgtggcctacgccgatgtgcagcacctcaaaggtaatgtgcagccgggcaaggtcggcgatgtgctggacagttggaacaccgagaaggtgcagttcgtggagattctcgaagccgcgcagatgctgcaacaggccgagcagaacctggcggagcaggaagtgaaactgcgcaaggaagaggaaaaggtcaccaagttcaagcgtgaggacagcgggttgcgctttaccatcacctgcctggtggcgtttacagtgtttcaggcggggttgttgatctggattgccacccaccgctgaaatgagtctatgccttgaaataaggtctgaatgtgggagggggcttgcccccgatagctgagtgtcagtatttggagtagctgactgatccaccgccatcgggggcaagccccctcccacattggccctattcgttcagtaaggtgggttaaacgcgggcggcaaacaccgcctgatgttgacggcattgctcagccgtcaacatgaacaccccatgcccaccgcgctggaagtccagccaggcgaagtccacttccgggtacaacgcctcgacgtgcacctggctgttgcccacttccacgatcagcaagcccttctcggtcaagtggtctgccgcttcggccagcatgcgccgtaccaggttcaagccatcgtcaccacaggccaggcccagcgccggttcgtgttggtactcatccggcatgtcggcgaaatcttcggcatccacatacggcgggttcgacacgatcaggtcaaaacgctggcccggcaggccgtcgaaaccgtcaccctgcacggtgtagacgcgctcatcgacgccatggcgctcgatattctggttggccacttccaaggcttcaaaggacaggtcgcccagcaccacttcggcgtcctgaaactcgtaggcgcaggcaataccgatgcagccggagccggtgcacaggtcgaggatgcgggcggggggctgggccagccagggttcgaagcggttttcgatcagctcgccaatcggcgaacgcgggatcagcacgcgctcgtcgacaatgaacgacatgccgcagaaccacgcctcattcaataggtacgcggtgggtacgcgctcatggatgcgccgatgcagcaaacgttgcacatgggagacttcctcttcctccagattgcagtctagataactgtcggcaatttcccatggcaggttcaaggcgccgagcactaattggcgggcttcgtcccaggcattgtcggtgccatgcccgaaaaacaggtcttccccatggaaacggctgacagcccaacgaatatggtcgcgcaacgtgcgcaggcgggatgtgatcacggggacaagctcctggaaaaaacgactggcgattctaacagccttcacctgtaccgacgatgtacgaaaacctgcgcccatccgtcggatttcatccaaattgccatcattgcgttaaacaggcccacctcttgacatggctgcacgtcaacaacggcgtaccttacgatggtagcgattcacagaaccgctcagccagtggacaatgtcgcaaaagcccccctcacaggagccccagaatgtccgttccaaagacgatgtttcaactcagcggtcgtggttacgcagcagcgaacctcagccatgcgaccctcgtgatcatcgacgcccagaaggaatacctcagcggcccgctcgccctctcgggcatggacgcggccgttggtaacatcaagcaactggtcgccgcagcgcgcaacgccgggcgcccgatcgtccatgtgcgtcacctgggcaccgttggcggcttgttcgaccctcaaggcgaacggggtgagttcatcccgggcctcgagcctgagggcgacgaaaccatcatcggcaaactgctgcccagcgcatttcacggcaccggcctggaaaaacacctgcaggacctcggttccctggatctgattgtctgcggtttcatgagccactccagcgtcagcaccaccgtgcgtgccgccaagaacctgggctttcgctgcaccctggtggaagacgcctgcgccacccgcgacctgccttacaaaggcggcatcctcagcgccgagcacgtacagcagaccgaaatggccatcatggccgacaacttcgccaccctggcgttgaccaaagatctgatctgatcgaccttctgatgagcggtgcggcaatttttattgccccgctcatccgcaaagccttttcatttggcgcatttacccctcgtcccggaacaacctgtgtattgtccggtcgaagggccgataccctggaggaaaggtcggaatgaagatatccgatggttttgatgctcgtcgcttgcgccccaagggcccgagcaactggcgtctgcgcctggtggccggcatcgccgcgctgctggcgatcgtaggtctgctgttggccggcgctggtggtgccggtctgtctggtcactcgccggcccttggcgagctgaatgccagccctggtggctcggctatcctgctggggatcgggctgctggtactgtggctgggcgtatggttgtggcggcgcagccgtcggaaaatgcgccagccgttgtcgcttaatatcgcttcgcacctgatgaaaaaacacgactgatggcgcttggatagcgtttcctgcgccccggccgccgcgatttaggtaaactgcccgcccttcgcggaggctgacatgcaagacgacgatttttccctgttcaaaaacgagctgcgcggcgtcaagccgatcaagcacgaccgcgccgacaccggcaaacccaaggccgaccgcgcgcagatcgccaagctgcgccaggccgcgaccgtgcgaaccgatgccaccaccgtggacggcctgtcggaccagttcgtgatcgacgtcggccccgaagacgagctgatgtgggcccgcgacggtgtgcaggaaagccagatgcgcaagctcaagatcggccagatcccgttcgaaggcagcctcgacctgcacggcatgaccgtggaaaaagcccgggagaccctgtgggcctttctcgccgaagccaccaagttcgaaatccgctgcgtgcgcgtcacccatggcaaggccgtgcggctggacggcaagcggccgatgatcaagagccacgtcaacacctggctgcgccagcatgcccaggtactcggctttacctcgtgccaggctcgtcacggcggcgcgggggcggtgtatgtgatgctcaagcggaccatgatggaagggcgcgacgaataacaagtgccatcgtcaggcttgcagcgatgtgcccgccaccgtaaccttgcgctttgcgaaaatcccacaggtagtttcatgtccctggaacagaattacaccgcgatcctcggccaactcggcgaggacgtttcccgcgagggcctgctcgacacgccaaagcgtgccgccaaggcgatgcagtacctctgccgcggctatgagcagacactggaagaagtcaccaacggtgccttgttcagctccgacaacagcgaaatggtgctggtcaaggacatcgagttgtactcgctgtgcgaacaccacctgctgccgttcatcggcaaggcccatgtcgcgtatatcccgagcggcaaagtgctgggcctgtccaaggtcgcgcggattgtcgacatgtatgcgcgccgcctgcagatccaggagaacctcagccgccagatcgccgatgcggtgatgcaagtcaccggcgccctgggcgtggccgtggtgatcgaggccaagcacatgtgcatgatgatgcgtggcgtggagaaacagaattcttcgatgatcacttcggtgatgctgggtgagttccgcgaaaacgcggcgacccgcagcgaattcctcagcctgatcaagtaacaggctgcgtaggaaaagaccggcgctcatcgccggttttttttcgcccgcagaattcaggtaagctgccgcccctcagttatgggcaagaggtttacaccatgttggtcaaagcacttcgagtcggcctcggccagatcatcatcgcgggcgacttcctgacccgtccccgcaaaaaacagcgccccgccgaacagcaggcgcaggtgaatgcagcggccaaggaactgaccctgtatcagttccacgcctgcccgttctgcgtgaagacccgtcgcaccctgcgccgcctgaatgtgccggtggcgttgaaggacgcgaagaacaacgcgcaggaccgccagaccctgctggagcaaggcggcaagatcaaagtgccgtgcctgcgtattgaagagaatggccagaccacctggatgtatgactccaaggtgatcatcgactacctcgacaagcgtttcgctgcggtctgacagacactggataaccaatgtgggagtgggcttgcccactcccacatttagttcagtattggcaaatcaatgtccagcagcgcggagcccaggcacttgccatgggcatccagcgccagcgagcgggtgacaccaccacgcagaatgcccggcagaacgaagttcagtgcctgcacattcgccagctcatagcgccgcaccggtgcggcgcctggctccagttggtcgacaaagaacgcggccacgcgctcaaccgtcagctgtgcgcagagcaatgggtaatcctcggcacgataggcaatgatcgaaatgttcgacgtgtcgcccttatccccggtacgggaatgggccagtgtgtgcagcttcatgcttcgatcctcggtttgaccgcatcacgcggcagcagcaacgacgccaccgccaccacctgccgcacgctcttgctcgcgccgccgccaccagacgggccgttggtgtaaagggtttccacttcgttgccgacgcgcaccgcttcgctgcgctcttcacaacgagccgccacgcgcaggcgcacttcccagggctccaccgtgctgcgcgggccgtgcagcgagtccatgccgatcaattcggcacgcacgtcctgcatcttcacccccatcaactcaaggcgcttgagcacgacatcccgcgccagctgtgcccgagcgacagcaccagggccaccgtaggacatctgcccttcaccgatccatccgtccagatagccaacactcaccttcaactgtgcgggacgcgagcgccccccagcaccttgggcacgaacgcgatccgcgccctcctcgacaaagcccacctgggaaaagtcggctgtaacatccggcgtcagataggccgcagggtcatgcacttcgtagatcagttgctcggtgcaggtggcacagctgacccgaccaccggagccggtgaccttggtgatcacggcttcaccgtcggcatcaatctcggccagcgggaaacccaggcgcgccaggtcatccacatccttgaaacccggatcggcaaaatacccaccgctgacttgcccggcacattcgagcagatgccccaccaaggtgccgcgccccaggcgcagccaatcgtccgctgcccagccgaactcaaacatctgcggtgccaggaacagcgaggggtcggccacgcgcccggtgatcaccacgtccgcatcggcgtgcaatgcctgcagaatgccgtcgacgcccaggtaggcattcgctgagatcaaccgttcacccaaagagccgacggtctggccgttatccagcaaaaactcgggctgcaacatcgtcaacacgtcgtcgcccaccacagcgagtaccttgagatccaggcccaactcaacagcaattcgccgcacttcggccgccgccgagactggattggccgcgcccatattggtgatcacccgcaggcgacggcgcccggtctgcacacccacaaacggcagcacccggcgcatgcgctcactcaacagcggatcgtaaccgccttgcggatcgctgatacgcgcctgttgcgccaaagcgatggtgcgttcagccaggcattcgaataccaggtaatccaggtcgccgtgttcggccaactcgaccgcaggttcgatacggtcgccggaatagccggcaccggaaccgatgcgcaaggttttcatctcaaatcactcccaggagcaacgcggtcagggtcatcaacaccgacgcggcaaacagaaacggaatggtgaagcgctggtgatcggccagttcgatcttgcacaggcccaccaacaggaaggtcgcaggggtcagtgggctgaccgggaaaccggtggtgtgcacccccagcaacgaggcctgggccacttgcagcgggtcgacgcccagggccttgccgacttcagcgatcaccggcatcacgccgaaatagtaggaatcggggtcgaacagcatgcttaacggcatggaaataaaacccaccaccgccggaatcaacttgccgtgacccgccggaatctgcgccaccgccacttcggcgatggccttgagcatgccggtgccttgcatgatcccggtgaacaccccggcggccaacaggatactggccatggtcagggcggtcttggcatgggcatcgatgcgggcacgctgggcatccacgttcgggtagttgatgcacaacgccactacggtgccgagcatgaacatcaccaccgggtcgacccagccggcaatcatcaccaccatcaccagcacggtgaggatcaggttgacccagaacaggcgcgggcgacgcagcttgatgtcgtcgtcgctgagcacccgttgcggcaccgcatccaccgtggagccggcgccgagacccaggcgtttttcttcgcgacggcccagccaccaggcacaggcaaacacgaagatcaggccgacgatctgcaccgggatcagcggctggaacaggtccgccaccggcacgtgcagggccgctgacgagcgcagcaccggcccggtccacggcaggaagttgacaccggcggccatcgcacagacgcaggcgaggatgcgtttatcgatgcccagccgcgtatacagcggcaacatcgccggcaccgtcaccaggaacgtcaccgcgccggagccgtccaggtgcaccaacagcgcaagggtcgcggtgcctacaacaatgcgtgtaggacgcgtccctaccgtgcgcaggatgcgatcaataatggggtcaagcatgccggcatcggtcatgatcccgaaaaacagaatcgcaaagacgaacatgccgaccacgggggcgacgttcttgatcccggtgatgatgaaggcgctggtttgcaggccgaacccgccgagcagtgcggcaatgatcggcaaggcgatcagggccaccagcggcgagagacgtttgctcatgacggcagcgagcaggcacaggatggtgatgacacccagggtagcgagcatgggttactccagagcggcctttttggccggttattgttttccctggagtattggaagcaggttagtctttgtaaattggaatattcacccgctagtgttcggaaaaacaaaatgaagaacagtatccaacacattcaggcgtttctggcggtggcacgtactggcagcttcaccaaggcggccaatgagctgcatctgtcgccttctgcgctgacggtgcaggtgcaacaactggaagactggctcggcgtcgccttgctcgaccgcagcccgcgccacgtcagcgtcaccgtcgccggccaggaggcccgcgggccgatggaaaaactgttgctggacctggacaacatcgtcagcgggtcccgcgacctggcggcgttgcgccgaggcgtggtgaccatcgccgccctgccctcggtctgtgccggcagcctgccgccggtgctgcgcctgtttcgcgagcgttttgcaggaatcgaagtgcgcctgcatgacctggtcgcccatcgcattcatgcccaggtgcgttccggtgaggtggatttcggcattggcgtgcgcgcacggctcagccatgggctggaattcgtgccggtgctgaacgatcgcctgtgtgcgttcgtaccggtggatcaccccctcacccgccatcgcaaactgaccctggaacaactggcggaccagccgatcatcctcactggccgcgacagcagcgtgcgtgagcaagtggatgcgcttttcgatgagacacgcctgacgatgaacgcgggcatggaagccaactacatgtcgacggtattggcgctggtgcgccaggggctggggatcagtgtgctgccggaatcggcggcggacagcctggcggggttgaaacgcatccccatcgatcatcccggggtgaaccgcgagatcgggttgatcagtcgcagcgggatgggcctaagccctgctgcacagcgttgtttcgacttgctgaacgaacaactgaatgtgggaggggcttgcccccgatagcagagtgtcaatcacacataagttgactgatacaccgcaatcgggggcaagccccctcccacacgtttaaccgagcataggcacatgcttgggatggctggccacacgctgcaaccacgcctgcaccgccggataagcctccagctcaaaaccaccctcattcgccacatgggtataggcatacaaggccacatccgcgatggagaactgctcgcccaccaggtacggcgtcagttgcagttggcgttccatgaccttgagcgccttgtaaccgcctttgtgcagcttcttgtattcctccaggcggtcttcgggcaggcccaggtaaaactggataaaccgcgccaccgcaatgtacggctcatggctgtactgctcgaagaactgccactgcaacacctgggtgcgcagacgcggttcgctgggcaggaactcgctgccatcggcgaggaagttgaggatcgcgttggattcccacaggcaggtgccgtcttccagctccagcacggggatcttgccgttggggttcttcgccaggaactcggcggtctgggtgtcacccttgaggatgtccacatcgatccattggtagggaatgcccagcaggctgagcatcaatttgaccttgtagcagttgcccgacttgtaatcgccataaaccttgtacatggggctccccttatgccgcttgcgcgtgctgtgcttgacggaccaccgcggccaggcgcttgagaccttcatccaaacgggccgggtcgatatggctgaaattgagccgcaacgagccaagatgttggtccggctcggaaaagaacggttcaccgggcatgaacgcaacgttctggtcgagcgcttgagccaacaaggtgcgggtgtcgagcggctgtttcaaggtcagccagaagaataatccgccctggggcacctgccagtcggccagctcggcgaattgacgctccagcgccgactggaaggcatcgcggcgctcgcgataaaagctgcgcagttgcgccaggtgctgctggtatttttccgtgccgatccactgcatcgcctgccattggccgacgcggttggtgtgcaggtccgccgattgcttgagcttgagcaggtgcgggaacaggtccgggctggcgatcagatagcccacgcgcaggcccggcaacagggtcttggacacggtgccggtgtagatccagctggcttttttcaggcgcccgacgatgggtttggcgctgccgccgtcgaaggtcagttcgcggtagggttcgtcttcgatcagggtcacgccgaattcgtcgagcaaggcggcgacggcttcgcgcttggcctcgctgtagcgcacggccgaggggttctggaacgttgggatcaagtagatgaaggccgggcgatggcgctcaagattggcacgcaacgcgttcaggtccggaccatcggcttccagttgcacggtgaggcaatcggcgccgaacagttggaagatctgcaacgcggccaggtaggtaggcccttccaacaggatctgcgtgcccttgtcgatgtacagcttggccgccaggtccagggtttgttgggaaccgctgaccaccaacacctggctggcctggcacggtacacccagggcacgcgcctcggcggcgagcagttcgcgcagctgcggttcgccttcgctcatgccgtattggccgatgttcagcggcatgtcgtcccagttcaaggcaggcaacatggcttcggccggcaggcctccggcgaacgacatcacttccggacgctgggccgccgcgaggatttcacggatcagggagcttttgaggcgcgtaacacgttcagagaaggccatggggtcaccggtagcgaagactgtgggaaatacgtcaaactggttgaccgaaattacgacgactcgcacggatacgtcaatatgcttgaccttaaaaaccccaccgcccagcaggccgccatggaagcgttcttcttcggctaccaagcgtttaccgccaaggccgacgaaatgctcgagcgccgtgggctgagccgggtgcaccagcgcattgtgtttttcatcgcgcgctacccggcgttgagcgtgaaggaactgctggagttgctcggtgtgagcaagcaggcattgaacatcccgctgcggcaattgcaggagatgcacctggtcaacagcgtcgcgtccgagacagacaagcgcaaacgcctgctggagttgaccgaagaaggcctgcgtttcgaacagtcactgcgccgcgaacaggtgaaattgctgcaacgtgccttcagtgacgcgggcgaagacgcggtagttggatggctggcggtgaatcaggcgctcgccaatcaaccctgatgcggtggtgacgctcctggggccgctacgcgccccaacgcggggcaagcccactcaccacgcaatcgtatggttgcctttcatctatttcgtgcagcaaatagaaaacattatttgctttatttgtatacaaaagcataattcgcttcgtgcgagttcctgacctattggtcaacaaacccgccagtacctctcagcgcttcggcgctgaccataacaataaaatgcttgaggagtactcgctgtggatagccgcaaatccgaagcctcgacgctggaccttgccccctcaccgaacggctggctggaacgcctgttcaaactgcgcttgcatggcaccacagtgaagaccgagctgatcgccggcctcaccaccttcatcaccatggcctacatcatcttcgtcaaccccaacatcatggccgatgcgggcatcgatcacggtgcggcgttcgtcgccacctgcatcgccgccgcactcggttgcctgttgatgggcctgtacgccaactggccggtgggcctggcgccaggcatgggtttgaatgcatttttcacctacaccgtggtcggcaccatgggctacacctggcagaccgcgctcggcgccgtgtttatctccggcgtgctgttcatgtttctgactctgtcgcgggtacgtgaatggctgctcaacagcatccccgtgagcctgcgccacgccatgggggccggcgtcggcctgttcctcggggtgatcggcctgaagaccgccggcatcatcgtcgaaagcccggcgaccttgatcaagctcggttcgctgcatgagccggcgccattgctggcggcggtgtgcttcctgctgatcgccatcctcagctaccaccgtgtgtttggtgcgatcctgatcagcatcatcgccgtgacactggccggctggggcctggggctggtgcactacaacggttttatctccacaccgccgagcctggcgccgacctggatggcgatggatgtggcaggtgtattcaatatcagcatgatcagcgtggtatttgcttttctttttgtacacatgttcgacaccgcaggtacactgatgggcgtcgcgcaacgagccgggctagtcaatgccgatggcaagatcgacaacctgtcccgcgcattgaaggccgacagtgcctccagcgtgttcggtgccatggtcggcgtgccgccggtgaccagctacgtggaaagtgctgcgggcgtagccgcaggtggccgtaccgggttgaccgccgtgaccgtcggcgtgctgtttgtggccgcgatgttttttgcaccgctggccgggatgattccagcctatgccaccgcgggtgcgctgatttacgtggcaatgctgatgatggcgagcatggcccatatcaattgggatgaagccaccgacagcatcccggcgattgtcaccgcgatcatgatgccgctgacattctcggtcgccgatgggattgccctggggtttatcacctacgtggcgctcaaggccggtacgggcaagtaccgcgagatttccgtcagcctgtgggtgctgtgcgcgattttcatcgcgaaattcatatttctataagaggtgttaggcatgagtctggaaacctggttgttgttcagtggcgcggcattggtggtgatcctgatccccgggccgctgtcgttgttgatgatcagcaacagcctcaactatggcttgcgccgctcctaccccgcatttctcggtggcgtaagcgcctcgatctgcctgctcagcgcttcggcgctcggcctgggtgccctgctgctggcctcggaacacctattcagcgcgctgaagatcgtcggcgcgttgtacctgttttacctcgcctggcagagttggcagcagtcgcgccagccaagccagggcgccgacgttccacaggccgcgccgaccccacgctttcgcgccttgttcgggcgggcgtttgtgctgggcgccagcaaccccaaggacatcctgttctttgccgcgttcctgccgcagtttctcaacagccagcagccgttcctggcgcagttgctgatcatgatcgccacctggaccgtgctcgacctgctgtgcaagctggcctacggcttgagtgcccacggcgctgcgcgctacctgcgcagtggcaagggccagggctggttcaaccggatcagcgccgggctgttcggtggcgcaggcgcgctgtcgttgctcaagagctgaccccgccgaacttgacgaaaaacaccgtcgggttggaacgcgatgtccactggataccggcaatgatcttgaccaggcggttctgattcaatgcccgactgatctcgggcatatgctccgaataggtacgcgccacactgcgccgcctgaaccattcgtcagtcaattgcacgctggtggcggaccgcaggttaacggtgctgttcttcacccagcgcgtgagcacgtagtacctggcgttggatttggggtgcgtgcagaagtaatccaccgagtactgcccgcccatgcgtttttcgatcgagtggatgacaaacccttgttgttccagcatccgggcaatcaccgcctgcaccacctgggccctggcactggcgttttcgcgggtgctcacgcgcaaggagggatcaaggggcgctggcagggtgaagtccatgcgcgtaaaccccggtgaacggccttcatagccaatgtagaaagccaggcgccgtcggctgtaggtcggacgcaacattttcagcaggtcatcggtgtggcccacggcaccgggggcgagccagtcatccagggtggcgcggagggtcaacagatggctggcggtcacctcacggccggtgtcggccaactcaatcaagcgctcacaggcggagcgccggctgagttccctcatgcggggaaacactcggcccatggtgttttccagcggctccaggaacagcaccggccgcgccttccagaggccatcggcgcccagcgtcgcaggaatcggctgctcactgaagccggcgcccaaccagaagtgaatgtcggtggccgcttgcggagccagcgcccgattacgggtgagaaagataatgctctggaacgacgaattggtcccctcgggcagcaaccggaacaaacgcccgtcttggcgcagcacatcgaaggcccgctccccctccccgcccgacacgcggaagatcccgcgctcgggcaacaggtctgtcagcacccatcgcgaatcgaacgcccacccctgccccgcaccgggcagatgggcggcgcggcccacgtgttcctgcagcatcgcatgagaaggcggcgaccactcctgggcgctgggggttgtagcccacggccgccacatctcggtactgggtcccggctgcggctggggtggcggggcatcggcgccaagcagccattccccgggttcctcgatgtgcagaatcagctcgttttgcacatcgtcctgcgggtgcttgagacgcagcacctgttcatcctggcgtcgatagaccgggtattgatgggtatcgtcgagcacaaattgctcgccacccttgacgtaagtgccccgattacccggcccctgcaactcgatggctgcgcttggcggcaggtccttgcgaaaccgttccagcgccttggccggcagggtcgtcgacggtttgagcgcagacagcccgccgccgaccaacccatgacgacggtgcagccggcccagggcaccgcgcatcgacgcgcgcgcggcggccacgcctgtcacccgcgcaccttttggcccgggaatgaacgcggtcagcacatccacaaagcccagcagcgtgacaaacaccaagtcaacggcgtcactgggatggcggctgtgatgaaagcgcctggccgccaacagaatctcgtaaaggctgacccccaggccgatcaccggtacgaacgacagcaacccacgcagcgtagccgcgtgttgctcgcccaagcgatcttgccggtaggcctccaatgttctggccgatacggcgcgcccctgtgcgcggtgctggatttcgagcatccgcgcgtgcgccaacagtgccaacgtatgactggcgggggttgcactgaagtcgagccaggcgttcggggcggcggcgatctgctcgttgatctgcgcctggatatcctccacggccaccgacggcacgcggtgcttgaccttgaacgagcgtatgaaccgggcgatggcctcgaccgtttccagcacatagaacccacgcaccggagcaaacaccagtctggttccaccggtagccaccatcgcccccccgctgccgacgacggggtaactggcgatggcctgcgtctcccaccccggtgccacctgatgggccagggctttcacattggccggggtcgcccaagcctggttcaaagcggcgacagcctgctcccggctcgtgtactcggcgatggccgggccatccactgcggcaggccagtacaccagccacaaccctgtggcttcgtcgtgggtcaccagcaccccggcgatatgccggtcgtgttccagggtatgcccgcacaggcgcacgaagtgcaatcgcaggcgatggccgttgccgttcagatcggccaccgcctgcgccgccatcagggtgttgaacacactctgggccttggcactcaggccctgccttgccgccgaaaacccatgcatacgcgcctgctggcgcagtacccggtcaatcagtccaccaggcaacgttgggggcgcgcaagcgggcggataaaacacttgctggatcaacgtgtcatagcgcccgccgatatccagggctgccagggtcttgatcaagtaacggctattcaagcgctgctgccactgcggcgccaggtagcgcgcgcggttcaagcgccactcggtccagggcgcctgggcatccagattgtgcagggccaactgcaacaggctgaatgtagtgcgttgcggactgacgactttcttgatatcccgctcgcccaccccgcactggctggtccacccgcagaagtaggcgctgacgtcatcgggcatatcgagcaagggctgatcgatatccacctccgggtacaacccatccagcttcaattgagcgatcagcagcttacgtgcgaacgcctccaactccggcaattcacgccagagcttggcttcgaatgcctgggcactgctcaagtaatgcagctgtaatcgtcggtaggcattgcgctgatcggcctgcgcctggcccagccatgccggcagtttattcgcctgggcggcggcgaaccgcagcagctccaggttggccatggcctcggtcaaggcgtcatgcgccggcacctgtaggtgctcgcgcatctcggcggccaacagcatccggatcagcgcccggtcgcggacttcactgaaaagccgcaagccctggtccagtccctggtcgagcctggcgtagtggttgatcagttcagtgagcccatggtgcagcacatgttcctcaagcacttcgtacgtcaccgtgatgtcagacgcagtcttcagcgcctggcgccgatcacgccccacgcactgccagaggggcgagccgtcgcgactgcacaggctaacccgcaggcgctcggatagcgtctccaggtcgtcgaatgcagccagcccgccgaagcgcccggccacacacagcagcactggctgcgtccgcaccggggtggcgtgggcctgtttagtcgtcactacgaacgcccccagcatcccctcgccgcccaacagcacccgcagcacgcaggtatcgctgccgttgcgatcgctggcatggggcttgttcaacacttcgaccaggcgctgcaagggcgcctcggccatcagtttcaaatgctgcagccgttgcacctcctgcaacaacgcctcgcgctgggcgatcaacaacaaggtggtacggttgcgcgtgtcgtctgggtgttccagccagaatgccgggctcagcaggcgctcatctgccccgagtgacagggcctgcaccgcatcagtctgtgcttgccattgcccattgagcgtgaccaatgcgtcataggccgtgctctcccggctcgggtcctgtgggtcgagcagcgtcatgaggcgcttttcgtagcgctccacctgctgttcgcggctgcgcaaggccagtccggacggcagctggccgaggatgatttctgccgcacgccgcgttgcatcccaacccaacaaggtccccagggaagcgcccaggtgctccgcgatcgccagtcggtcccggcctttttcgataaaccgcaggaagcgcgccgtgtcacgccccagtgaagccggcgccgctaacgtcgcgtgattgatcgacaacgcgcacgccagctcgttgtcccattgcgcatcaagcacggcgattgcactgtgctgcaaggcatcgccgctcagcgcagcgccacgcgccaactgcgtctcgccgcgacagacttcgtggcgacggcgtagcggcaagcactgccacaagacactgaacaacgcgccgttcaacaggctcgccaaaccgcgttgcacctgttcccaagcactgaactcatagaatgcgcgggccatccctggcagatagatcacgtggggcgcctgctgcgccgcgccctcacggtacaagtgcagggcgccgggaatggccagcgccgtctgaaacgtgccgggccacagtactgtgccgacgcgcacgccagcccaatcgccgccagcgcgctggcgtgcctcttcggaaggcgcatccgccaactgctgcaccaacgcccaacccgcatccgacagttcatccaactggtgcgccaggaagcccgcgtcgatgaacaaacgcttgcgcaattgcacccaacgcgcctggcgcgtcaaccacgagccgtacgccaaatactgccagtattcacgtacctggttgtcgagccgagccatcaaccccagccccttgacccgctccagcgcctgccgggcggtaaaaggcagtttgcgcgcagggtcgtccttgaggctcagcgcggtatactggttaaggttgatcggcaaggacggatcgctgaacaacgccagcgcgcgctcggtcagactgtcgactttctgcgcgggacgtggcggcaggggctcggtgaacagcagggtgtccggatccaggccaaaggcttcctgcaacgcgaaacgaatcacccgcaacagccgtggcgccctgcctatcagacgcttgagcgcctttgaggattcgatacagcgcgtgttcacgaggtgccattggttgatcagccggctgggttgggcggatgcgttgaggcggcgcgtcagcaagcggcgaacggcttgatcacgggcctcactggcctgaatgggattgtcgagatcaaagggttcggcggtgacagtgtccggtgccgagactacggggttgaggggatcagagctcatgacggcgtcttcttgtacgaaagacgccgagcctaggcctcatccctctaaggtgtgcgccacataattgaacgggcgggcgggcaaatgccaggcaaaaaaaagcccgcagtgtgcgcgggcgaaaccaacgaagagctttgggggtgtgaagcgaggtgacgctcagctaccgcgataggtggagtagctgtagggcgaaatcagtagcgggacatggtagtgatcctgctcggcgctgatgccgaagcgcagcaccaccacatcaaggaaggccggctccggcagttgcacgccgcgggcgcgatagtaatcaccggcgctgaactgcaattggtacacgccgctgcggtagtcgtcaccttgcaacagcggtgcgtcgcagcggccgtcgctgttggtctgcgcggtggccaccagttccagctgcacgccttcgacgcggtacagctcaaccttgattgcgctgccggggcagccgtgtgcggcgtccaatacgtgtgtggtcaagcgtcccatggcgtctgcgcgcctcctgtggtcagtagaaaagtgatccgcactttttcagggcatcgaaaaagccggtgatgatcgattaagacactttttaaaaaaattgtacacaataaaaatcacaaactctcagatcagcctactgccattgctcaacagggcaatctgcgcgttatccttgcttttaaaagaccttttgtccattagctgaccaaccaggcaagtttcttgctacacctctggtctagcgctacgccgaaaaaatgcagaaatgtaggcttacaaagtgcgcgataagttgtatacaatcactcatcgctactacgacgaacaagaaggaagactgcagtgagcgctgactacccacgcgacctgatcggttacggcagtaaccctcctcacccccactggccgggcaaggcgcgcattgcgctgtctttcgtactcaattacgaagaaggcggcgagcgcaatatcctgcacggcgacaaagaatccgaagcgttcctttcggaaatggtctcggcccagccgctgcaaggcgcgcgcaacatgagcatggagtcgctgtacgaatacggcagccgtgccggcgtgtggcgcatcctcaagctgttcaaggaattcgacatcccgctgaccatcttcgccgtggccatggccgcacaacgccatccggatgtgatccgcgccatggtcgacgccggccatgagatctgcagccacggctaccgctggatcgactaccaatatatggacgaggcccaggagcgcgagcacatgctcgaagccatccgcatcctcaccgaacttaccggcgaacgccccctgggctggtacaccgggcgcaccggccccaacacccggcggctggtgatggaggaaggcggcttcctctatgactgcgacacctacgacgacgacttgccctactgggaacccaacaaccccaccggcaagccgcacctggtgatcccctacaccctggacaccaatgacatgcgcttcacccaggttcagggtttcaacaagggcgatgactttttcgagtacctcaaagacgccttcgacgtgctctacgccgaaggggccgaggcgccgaaaatgctttccatcggcctgcactgccgcctgatcggccgcccggcgcgcctggcgtcgctgaagcgctttatcgaatacgtcaaaggccatgagcaggtgtggttcactcgccgcgtcgacattgcccgccactggcaggaaacccacccctacacgggagcggccaaatgactgcgttccacagcctgaaaccctcaaccctgagccgcgatgcgtttgtcgccgccttcgccgatatctacgaacactcgccatgggtggccgaaaaggccttcgatctgggccaggacacttcgatcgaccagatcgaaaccctgcaccagcgcatgagcgacatcctgttgagcgctgatcatgcccgccaactggcgctgatcaacgctcacccggacctggccggcaaagccgccgtccagggccaactgacccaagccagcaccgatgaacaagctggcgcggggattcaccaatgcacggccgaagagttctcgcgcttcaccgagctgaacgacgcctacaaggccaagttcaagtttcccttcatcatggcggtaaaaggcagcaaccggcaccagatcctcgccgcgttcgaaacgcgcatccataactcggtggacaccgagttcaagtgcgcgctggacgagatcaacaagatcgcgttgttccgtttactgaccctctaaacgaccatccccagccactctattcaaggcagacaagaagaatgaaagcttacgccgtacctttcgagaagttcgtcaacctggccgacgcccgcctgggcaccaagatcatctctgttaccgatgactggttcgccgacgccaaccgcctgttccagccgaccccggccgtgtggaaggagggcgttttcgatgacaacggcaagtggatggacggctgggagtcgcgccgcaagcgcttcgaaggctacgacagcgcggtgatccgcctgggcgtgccgggctcgatcaaaggtgtggacatcgacacttcattcttcaccggcaacttcccgccatcggcttccctggaagcctgcttcctggcttcgggcgagccggatgacaacacccagtgggtcgaagtgctgtccgccgtcgagttgcaaggcaacagccaccactaccacgagatcaacaacgaccaggccttcagccacctgcgcttcaacatctacccggacggcggcgtggcgcgcctgcgcgtatacggcgtgccgttccgcgactggtcctcggtgggcgacaacgaacaggtcgacctggcggccgcactcaacggtggccgtgccctggcctgctccgatgaacacttcggccgcatgagcaacatcctcaacccaggccgtggcatcaacatgggcgacggctgggaaaccgcgcgtcgtcgcacgccaggcaatgactgggtaatcgtggcgctgggtcacccgggcgagatcgagaagatcatcgtcgacaccttgcacttcaagggcaactacccggacacctgctcgatccagggcgcgttcgtcaagggcggcaccgacagccagatcgaaacccaatcgctgttctggcgcgaactgctgccggcgcagaagctggaaatgcacgccgaacataccttcgccgagcagatcaaggcgctggggccgattacccacatccgcctgaacgtgttcccggatgggggtgtgagccgcctgcgtgtattgggcaaagtagccaagtaagcggtgaacccgatcgcaggcaagccagctcccacatttgactgtattcacaaatcaaaatgtgggagcgggcttgcccgcgatggcggcagaacaaaccacacaaaattcggataagaagacagccatgcgcacactagtgatcgaacccctgaccaaagaagccttcgcccctttcggagacgttatcgaaaccgatggcagcgatcacttcatgatcaacaacgggtcgaccatgcgctttcacaaactggcaacggtggaaaccgcaacgccggaggacaacgcgatcatcagcatcttccgcgccgatgcgcaggacatgccgctgaccgtgtgcatgctggaacgacacccgctgggcagccaggctttcattccgctgctcggcaacccctttctgatcgtggtcgcgccacttggcgatgcacctgtatcgggcttggtccgcgccttcgtcaccaacggcaggcagggcattaattaccatcgcggcgtctggcaccacccggtgctgacgatcgaaaagcgggatgacttcctggtggttgatcgcagtggcacaggcaataactgcgatgagcattttttcaaagaggatgagcggttgatcctcgccccccaccaataagagaaggtctgatcacccgacaacaagggtgacaggcgagaggtaaagactgtggaagcacatttgatggaatggctgaacctgagcgtgcgctgggttcacatgatcacgggcgtcgcgtggatcggcgcttctttctacttcgtctggctggaaaacaacctcaatcgcgtcaaccccaagagcggcctggccggtgacttgtgggcgatccacggtggcggtatctaccacctggaaaaatacaaactggccccgccgaccatgccggacaacctgcactggttcaaatgggaagcctatttcacctggatgtcgggcatcgcgctgctatgcgtggtgttctactggaacccgaccttgtacctgctggccccggacagcagcctcagtggtccggaaggcgtattgctgggcattggctcactgttcgccggctggttcatctactccttcctctgcgactcggccctgggcaagcgccctgccctgctcggtttcattctgttcgtgctgttgatcgccgccgcgtacgggttcagcaaagtgttcagtgggcggggtgcgtacctgcacgtgggtgcagtgatcggcaccatcatggtgggcaacgtgttccgcatcatcatgccggcgcaacgcgcgctggtggcggcgattgcggaaaaccgcacgccggaccctgcgctgccggccaaaggcctgctgcgttcgcgacacaacaactacttcaccttgccggtgctgttcatcatgatcagcaaccacttcccgagcacctacggcagccaatacaactggctgatcctggcgggcatcgcagtggcggcggtgttggtgcgtcactacttcaacacccggcataacagccagaagtatgcgtggacgttgccggtgggtgcgttggcgatgatcagcctggcctacgtgaccggccccaagccggtggccgaagtggccaaggcccccgcggccatcgagtaccaaccattgccggaaaccgcactgggcggtggcttgaaaccggcagcgcctgcagcacccgccgctgaaccggcgccggcccaggcgacgattgatttcgacaaggtccacggggtgatccaggaacgctgcgccgtgtgtcactcggccaagcctaccagcccgctgttcagcaccgcacccgctggcgtgatgttcgacaccccggcgcagatccagcaacaggcggcgcgcatccaggcgcaggccgtggcgagccagatcatgccgttgggcaacatcacccagatgacccaacaggagcgggatttgatcggcacctggatcaaccagggggcgcgtaccaactgacaggctggcgcagatccaaatgtgggagggggcttgcccccgatggcagtgtgtcattcaacgcatcagtgactgaaccactgcaatcgggggcaagccccctcccacaagggtctccagtgttttgaagattgagctctacccggcaattgaatgccaaacaacacaacaataaaaaagatccgaggtgttgcatgaccgagttagccgaaccgcagattcccgccgcacccgccctggtgcggctgcccctcttgcaactgattctggtaggcctgcaacacgtcttgctgatgtacggcggcgccgtcgccgtgcctttgatcattggccaggccgcaggcctcagccgtgaagaaatcgcctttctgatcaacgccgacctgttggtggccggcatcgccaccctggtgcagtcgttcggcatcggcccggtgggcatccgcatgccggtgatgatgggcgccagtttcgccgccgtcggcagcatggtcgccatggctggcatgcccggtatcggcttgcagggcatcttcggcgcgaccatcgctgccgggttcttcggcatgctgatcgcaccgttcatgtccaaggtcgtacgtttttttccgccgttggtgaccggcacagtgatcactgcgattggcttgtcgctgtttcccgtggcagtgaactgggcaggtggtggcagtgccgccgcgactttcggctcaccggtctacctggcgattgccgcgctggtactggccaccatcctgctgatcaaccgcttcatgcgtggcttctgggtgaacatctcggtgctgatcggcatgggcctgggctacgccttgtgcggtgccatcggcatggtcgacctcagcggcctgtctcaggcgccgtgggtgcaggtggtgacgccgttgcacttcggcatgcccaggttcgagttggcgccgatcttgtcgatgtgcctggtggtggtgatcatctttgtcgagtccaccgggatgttcctcgcgctgggcaagatcaccgggcaggacgtcacgccgaagatgctgcggcgcggcctgctgtgtgatgccggtgcgtcattcttcgccgggttcttcaacaccttcacccactcttcgttcgcgcagaacatcggcctggtgcagatgaccggcgtgcgctgccgttcggtgacgatgatggccggcgcgtttctgatcgtactcagcctgctgccgaaggcggcgtacctggtcgcgtcgatcccaccggcggtgctgggcggcgcggcgattgccatgttcggcatggtggcggccaccggaatcaagatcctgcaggaagccgatatcgccgaccggcgcaaccaattgctggtggcggtgagcatcggcatgggcctgatcccggtggtgcgcccggagttcttcgcgcaactgccgctgtggatgagcccgattacccacagcggcatcgccatggccaccctcagcgcgttgtcgctgaatatcctgttcaacattctcggcggttctgaacgacctgccgttgctcctacgcattgattccttcgttcgcacaaaaacaataacgaaacagggaacatcaacatgcacacccttcacctggggccggtcacaagccgtgccccattctcgccccgcgcgcgctgtaacggcgcacttgagcccaggcctgggagccagtattctccgcgcccgctcgaatcgactcaaaaaaaaacagcaaatgtaaaagctgactgcaaggccaacttatcccggcctcctgtctgcggccaaagtgcgcaaatgtcctctgaattcgactgcatctcatgcagccgacggggattttttggcttttttaacaccttggcgcagctcttgctaaaagcactaaagctgaccgaacagacgatttttgcagcgaaccaaaaggcgccacaccagagcgcctgcgtagaagaaaaaccataaaactttaactcgggagcaaccgaatgaaacctatgttcaaaggcctgatgctggcgggatccctgctggccggtggccaagccgtggccggtgacctgttgcagtggcagaacaacagcctgacttacttgtggggcaagagctttaccgtcaacccgcagattcagcaaaccgtcacgttcgaacatgccgatgcgtggaagtacggtgataactttgtgttcgtcgaccgcatcttttacaacggcaaggaagacggcaacgtcgggcccagtacctattacggcgaaatcagcccgcgcctgtcattcggcaaaatctttgataaagacctgtcgttcggaccgatcaaagatgtattgctggcctttacttacgagttcggcgaaggcgacaacgagtcgtacctgctcgggcctggctttgacttgaacatccccggtttcgattacttccagttgaacttctaccagcgccagaccgaaggcaatcgcccgggtgacggtgtatggcagattaccccggtgtggtcgtacaccatccccgtgggcaactccgatgtgctgatcgacggtttcatggactgggtgacggacaacgacaagaacgcccgtggcacctaccacgccaacctgcacttcaacccacaggtcaaatatgacctgggcaaggcgctgcattggggcgacaagcagttgtacgtgggctttgaatacgactactggaagaacaagtacgggatcgaagattccggcgcgttcaagaccaaccaggacacggcaagcttcctggtcaagtatcacttctaaaagccactgcaagacaaatgtgggagggtgcttgctcccgatagcggtgtgtcagtcagtacatcagtgactgaacaactgctatcgggggcaagccccctcccacatttggatctatgccaggcctaggaaccgagtgatttcctcacgtttggccagcgcatctttgcgccccagctcgatcaactcgctgcaatatcccgcctcgaacagcaggtaactcaacacccccgccccgctcgtcttggtcgcccccggcccgcgcaaaaacaagcgcaacgccgccggcagttcctggcgatgccgcgctgcgatctcatcgatcggctggctgggtgcgatcaccagcacctccaccgccgccacaccaggcgcgacatggctgaactggttcaagcgttcgagcaattcgatatcgccttccaggctgtcaatgaacgtgctgttgagcatatgcccaccgatctgcgccagggtcggttcctgaccggtgtagctgcgctgcaccgccggttcattgcctcgtgggttgccgctgacacccaccaccagcacgcggctggcccccaggtgcaaggccgggctgatcggtgctgattgccgcaccgcaccgtcgccgaagtactcctggtcgagtttgaccggcgcgaacaacaaggggatcgccgagctggccagcaggtgttcgaccgtcagttgagtcggcaggccgatacggcggtggcgcagccaggcatcgatggtgccgccgccctggtagaaggtcaccgcctggccggactcatagccgaacgccgtgaccgctaccgcatgcaggtgtttggcgcggatcgcttcgtcgatgccgtccagatgcagtttgtctttgagcaacgccttgagcggcgtgctgttgagcagtgccaccggcacttgcgcgcccaagcccagcaggctgtggataaagaagcgactcgcctggcgaatcactcccggccaatcactgcgcaacaccagatggctgcgaaagccctgccagaacgcggtaagacgttggatcgcggcggtgaagtcggtggcgccactggccaggctcaccgcattgatagcgccggccgaggtgccgacgatcaccggaaaaggattaggcgcccccggtggcagcaactcggcaatcgccgccaatacccccacctgatacgccgctcgcgccccgccgccggaaagaatcaagcctgtaaccggttcagctgggcgcattgcgtcactccatgtggggaaaagtcgttcttatcagcggcgtttttcgtacagcttgggttcacccggcggccggctcttgaagcggcggtgggtccacaggtattgctcggggcattcacgcacggaggcttctacccattggttgatgcgcaggcagtcgacttcatcgctttcaccgggaaaatcggtgagcggcggatggatcaccaggcggtaaccgctgccatcggccaggcgctgttgggtgaacggcaccaccagcgccttgcccagcttggcgaacttgctggtggccggcactgtggcagcctggatgccgaacagtggcacgaaaatactttgcttggcgccatagtcctggtccggtgcgtaccagatggcacgcccggcacgcagaagcttgagcatgccgcgcacgtcttcgcgctccacggcgagggaatcgaggttgtgacgttcgcggccacggcgctggataaagtcgaacagcgggttgccgtgctcgcggtacatgccatcgatggtgtgcttctgccccagcaacgctgcgcctatttccagggtggtgaagtgcagggccatgaggatcacgcccttgccatccaactgggcctgcttgaggtgttccaggccttcgacgtgggccaggcgcgccagtcgcgggcgcgaccaccaccagctcatggccatttcaaagaacgcgatgccggtggaggcaaagttttccttgagcaactgtttacgctctttggcggatttttccgggaagcacagttccaggttgcgtgcggcgatacggcggcgttcgccggccacgcggtacatgcccgcacccagcaggcgaccgatggtcagcagcgcgcggtacggcagttgggtgaccagccacagcaggccgagccccagccataacagccagaaacgcgggtgaaaaaatacagctcgaaaacgcgggcgatccattacagattccggtaaagacaagggccgcgcattctacaacggttcgacccggcttgcggcgggtgagtgttctcgttataagtctcgacacttttcgtgacaagccgcttttgccgaccatgagccaaaccgaaccgctagaccaagatcccgtgttccagctgaaaggcagcatgctcgccatcaccgtgctggaactcgcccgtaacgacctcgacgccctggaccgccagctggcggccaaggtcgccctggcgccgaacttcttcaacaacgccccgctggtgctggccctggacaagctgcccgccggccagggcaacatcgatttgcccggcctgatgcgcgtgtgccgctcccatggcctgcgtaccctggcgattcgcgccagccgtatcgaagacatcgcggcagccatcgccattgaactgccagtactgccaccgtccggtgcacgcgagcgtccactggaaccattggtcggtgaagagaagaaaaaaccggaaaaaccacccgagcctgcgatcaagcctacaaagatcatcacctcgcccgtacgcggcgggcagcagatttacgcccagggcggcgaccttgtggtgatctcctcggtcagcccgggggcggaacttctcgccgatggcaacatccatgtatacggcccgatgcgcggacgtgccctcgccggcataaagggtgataccaaggcccgtattttttgccagcagttgaccgctgagctagtgtccatcgcaggccagtacaaggtttcggaagatttgcgccgtgatccgctgtggggggcttcggtgcaggtcaacctgtcgggcgatgtgttgaacatcatccgtctttaacggatactgccgcattttccaagcatctctagactctgatagcacagcgaaaccggcattacttatgtaggaattttttattcctacaaggctgtccgcctgcagcgagttccaagagatgtttttcagggactgaaaagtcctttttccttaggggtgaaacaccttggccaagattctcgtggttacatccggcaagggtggtgtgggtaagaccaccaccagcgccgctatcggtaccggcctcgctctgcgcggccacaagacagttatcgtcgacttcgacgtcggcttgcgtaacctcgacctgatcatgggctgcgaacgccgtgtggtgtacgacttcgtcaatgtggtcaacggcgaagccaacctgcaacaggccctgatcaaggacaagcgccttgagaacctgtacgtgctggccgccagccagacccgcgacaaagacgcgctgaccaaagaaggcgtaggcaaagtcctggccgagctgaaggaaaccttcgaatacgtggtctgcgactcgccggccggtatcgagaccggtgctcacctggcgatgtactttgccgatgaagccatcgtggtgaccaacccggaagtctcctccgtacgcgactcggaccgcatgctcggcctgctggccagcaagtcccagcgcgccgagaaaggcgaagacccgatcaaggagcacctgctgctcacccgctacaaccctgaacgcgtcagcaacggcgagatgctcggcgttgaagacgtgaaggaaatcctcgcagtgaccctgctgggcgtgatcccagaatcccaggcggtcctcaaggcctccaaccagggcgttccggtgattcttgatgaccagagcgacgccggccaggcgtacagcgatgccgttgatcgcttgttgggcaagaccgtggaacaccgcttcctcgatgtcaagaagaagggattcttcgagcgtatctttggaggcaactaaacaatgaaatttctcgacttctttcgcgccaacaaaaagccaagtaccgcgtcggtagcgaaagagcgtctacagatcatcgtggcgcacgaacgcggccaacgcagcacgccggactacctgccagccttgcagaaggaactggtcgaggtgatccgcaagtacgtcaatatcggcaacgatgacgtgcatgtcgccctggaaaatgacggcagctgctcgattctggaactcaatatcaccctgcctgatcgttgatcgaacaggcggccgccacggcggctcggtcaccttgatcccttttcgggaaccgggtgggcgagccgccgttggcgtttgttacgaggctgtttaatgccgctgtccaatatccacatcctgtatcaggacgatgccgtcctggtggtgaacaagcccaccctgctgctctcggtgcctggccgcgccgacgacaacaaggactgcctgatcactcgcctgcaggaaaacggctaccccgaagcccgtatcgtccatcgcctggactgggaaacctcgggcatcattctgctggcgcgggatgccgacacgcaccgcgagctgtctcgccagtttcacgaccgtgaaaccgaaaaagcctacaccgccctggcctggggccaaccggaactggacagtggcagcatcgatttgccgctgcgctacgacccaccgaccaaaccccggcatgtggtcgaccacgagttcggcaagcatgcgctgaccttctggaaggtgctggagcgttgcggggactggtgccgcgtcgagctgacaccgattaccgggcgttcgcaccagttgcgcgtgcacatgctctccatcggccacccgctgctgggcgacggcctgtatgcccatgagcaagccctggccgcctggccgcgcctgtgcctgcatgcaagcatgctgagcttcacccacccacagagcggcgagcgtttgcgtttcgagtgccctgccccgttctgaagaataaatacggtaaactcgcggcattgttgtctggagctatttatgcgcgaagcgttgaatcaaggcctgatcgacttcctcaaggcctcccctactccttttcatgccactgctgccctggcccagcgcctggaagcggccggttaccagcgtctcgatgagcgcgagacctgggccaccgaggccaacgggcgctattacgtgacccgtaacgactcctcgatcatcgccttcaagctcggccgccattcgccgctgcagggcggcattcgcctggtcggcgcccacaccgacagcccgtgcctgcgggtcaagccgcagcctgagctacaacgccagggcttctggcagttgggtgtggaagtctatggtggtgcattgctggcgccgtggtttgaccgcgacctgtccctggccggccgcgtgaccttccgccgcgacggcaaggtcgaaagccagttgatcgacttcaagctgcccatcgcgatcattccaaacctggccattcacctcaaccgtgaagccaaccagggttgggcaatcaatgcccagaccgagctgccgccgatcctcgcgcaatttgccggtgacgagcgcgtggacttccgcgccgtgcttaccgatcaactggcgcgcgagcatgggctgaacgccgacgtggtgctcgactacgagttgagtttctacgacacgcaaagcgctgcggtcattggcctgaatggcgacttcatcgccggcgcacgcctggacaacctgctgtcgtgctacgccggcctgcaagccttgctcaccagcgacagcgaagaaacctgcgtgctggtgtgcaacgaccacgaagaagtcggttcctgctcggcatgcggcgctgatggcccgatgctggagcagaccctgcgtcgcctgctgccggaaggcgatgaattcgtacgcaccattcagaaatccctgttggtgtcggccgataacgcccacggcgtgcacccgaactacgccgagaaacacgacgccaaccacggccccaagctcaacgccggcccggtgatcaaggtcaacagcaaccagcgctacgccaccaacagcgaaaccgccgggttcttccgccacctgtgcatggcccaggaagtaccagtgcagagcttcgtggtgcgcagcgacatgggctgcggctcgaccatcggcccgatcaccgccagccacctgggcgtgcgcaccgtggacatcggcctgccaacgtttgccatgcactccattcgtgagctgtgcggcagccatgacctggcgcatttggtgaaagtgctgggcgcgttctacgcgagccacgatctgccctgataatttgggctgactcggtcaaaaatgtgggagggggcttgcccccgatggcggcggatcagtgactatatttgtagtctgaccctctgcaatcgggggcaagccccctcccacattagatctgcgtatacctgacctgcatcacctgcactttctgcaatccggcctagacttgtcagtattcccactccgacaaggccgtcccctcccatgatctccatgtcttccttccacgccatgcttatccctatcctgatcggcatgatcatgttggccgtgggtttcaactttcgcgacaagcccctcggcgtgttcggcatgtggctcggcatgctgctgatcctgggcaccgtggtgtacaagatcctcgccaaactggccgaatgacgcttgcactcgtacactcgctcaacccgtcgtttccaaggttgaccgcctcgtgctttcccgtctgtttgccctgccctgctattgcttgatcgccctgctcaccttgctgccgctcacgcctgcccatgcagtgggtttgcccggcttgctgggcagtaccaacaagacccagccccaggccgaagtgccactggggcagtcgctggacgaggtgatcaagaccctggaaaacgaccagcagcgcacccagttgctgagcgacctgaaaaagctgcgcgccgccacgcaaaaggcccaaccggccgccgaagaaggcgtgctgggcttgatcggcggcaccctggccaacctggaggcacagttctccggggccgacagcccgctggggcgctggtccaacgaagtcgacctggccaaggaagaactcgacgcactgatgctgccggccaatgaatggctgccgatcattttcgggtttgccttgatccttgccgtgtggagcctgttggcgtacgcgctgatctggctcagtcaccgggtgcgcgaacgtttcggcctgcccgaagaattgccgcaacatccacgcacctgggacatggtgcgcttcgccctgcgcaagctcggcccatggatgatcgccctggtgatcacggtgtacctgagctacgccctgccctcgtccctgggcaagtccctggcgatggtgctggcctacgcactggtggtcggcacctgtttctcggcgatctgcgtgatcgcgttttctgtactcgacggcccgcaccgtcatcgcgcgctgtatatcctgcgccaccaggcgttccgcccgctgtggtggatcggcagttttgccgcctttggcgaggccttgagcgacccgcgactggtccaggcgctgggccagcacctgtcccacaccgccgcgacggtcgccaatgtgatggcggcgctgtcgaccggtgtattcatcctgcgtttccgccggcccatcgcccacctgatccgcaaccaaccgctgtcgcgtcgcctgacgcgccgcgccctcagcgacaccatcgaaatcatcggctccttctggtacatcccggccttgctgttggtgggcatctcgctgttcgccaccttcgtgtctgccggcgataccagcacggcgttgcgccagtcgctgttgtgtacggtgctgctggtgttgtgcatggtgatcaacggcctggtccgtcgccacgcgctcaaaccgcagcgtgggcacaagcgtcacgcgctgtattccgaacgcctgaaaagcttcgtctacaccctggcccacctgatcgtgtggctggtgtttatcgagttgggcctgcgggtgtggggcctgtcgctgatccgctttaccgaaggcgatggccatgaagtcagcgtcaagctgttcggcctggccgggaccttgctgttcgcctggctgatctggattctcagcgacaccgcgatccaccatgccctcacccgctcgcgcaaaggcctggccaacgcgcgggcgcagaccatgatgccgttgatccgcaacgtgctgttcgtgaccatctttatcattgctgccatcgtcgccctggcgaacatgggcatgaacgtcacgccgctgctggcgggcgccggtgtgatcggcctggccattggtttcggcgcgcagtcgctggtggcggacttgatcaccggcctgttcatcatcatcgaggactccctggccatcgacgactacgtggatgtgggcggccacctgggcacggtggagggcctgaccatccgtaccgtgcgcctgcgggatatcgacggcattgtgcacaccatcccgttcagcgagatcaagagcatcaagaactactcgcgggagttcggctacgcgatcttccgggtggcgatcccctacaacatggaaatcgacgatgccatcaaactgatgcgcgatgttggccagaaaatgcgcaacgacccgctgcaacgccgcaacatctggtcgccgttggagattcagggggtggagagtttcgagtcgggcagcgcgatcctgcgggcgcggttcaagacggcgccgatcaaacagtgggaagtgtcgcgggcgttcaacctgtcgctgaaacggcatctggatgaggcggggttggacctggccacaccacgcttgagcgtgcaggtggtgacgggggcttcgggcggattagacaaagaaaaaaatacctgaaagcaacacagctcaaaatgtgggagggggcttgcccccgatgnnnnnnnnnnnnnnnnnnnnnnnnnnnnnnnnnnnnnnncatcgggggcaagccccctcccacatttttgatctgtggcgtttacacgatcgcagtgccatccatcttctggcgcaggctcaacgggcgcatgtcggtccagacttcttcgatataggccaggcactctttcttcaggccgctcttgcccacggtgcgccagccttccggcacggccttgtagtcgggccagatggaatactgttcttcatggttgaccactacctgaaacaggatgtcgtcgcggtcaaatactgaggtcattgctgttctccatcgctaaaaggctggctgcgcaccgtgcgcagccctgatatctgtagaaacgtaccaggctggcaaaaaattagaggctggcgaccgctgccgccaacgcgcgaccgaagatgtccgccacccggtccacttcggcggcagtgatcaccaatggcggcaggaagcgcaccacactgccgtgccgaccgcccagttcgaggatcagcccgcgcttgaggcattcacgctgcaccagcggcgccaattggcgatgcacgggcggatggccttgaatgtccggcgtgccgttcgggtcgaccagttccacgccgagcatcaacccacggccccgaatatcccccaggtgcgggaagtcgcgctgcaggatgcgcaggtgttcacccaggcgctcgcccatggccgccgcgtggccggccaggtcgtgatccttgaggtagcgcatcaccgccgaacccgccgccatggccatctgattaccacggaaggtcccggcatgggcgcccggcagccaggtgtcgagccagtcgcgatacaccaccaccgccagcggcaagctgccgccgatggccttggacatcaccaccacatccgggatgatcccggcgtgctcaaaggcaaacatcttgccggtgcgaccgaaaccgctctggatttcatcgacgatcaacgccacgcctgcctgctcggtgatgcggcgcaggccgcgcagccagtccaggtcagccggaatcacgccgccctcgccctgcaccacttcgacaatcaccgccgccggcagcaatacaccggcctccggatcattcagcaggttttccaaataatgcaggttgacccgcacgccttccgcgccacccaggccgaacgggcaacggtagtcgtaggggtatggcaaaaattgcacaccattgccgagcaaggcgcccaggggtttcttcggccccaggctgcccatcaggctcaaggcgccctggctcatgccgtggtaaccgccctggaaggacaatacggtgctgcgcccggtggcggtgcgtaccaacttcaacgcagcttccaccgcatcggtgccggtggggccgcagaactggattttcgcttcccgcgccagcgcgggcggcaacaaaccgaacaggtcctgcacgaactggtccttgaccggggtggtcaggtccagcgtgtgcaggggcagttcatcggccagcacctgttgaatagcctcgatcacgaccggatggttatgccccagcgcgagggtgccggcgcccgccaggcagtcgatgaagctgcgcccttcgacgtcttccacgtaaatccccttggcacgcttgagtgccaggggaatgcgccgcgggtagctgcgggcattggattcctgctggcgctgacgggccagcagcggggtttcgtcgaactggtaaagcgtttcatgcacctgggcgtcttcgatacggctggtagcgactgacatttctcgatccctcaatacgctgatgatggtgaccaaactgccgatccgctggcgtctggccccaaggggcatgcgcacggatttcctgttctggaaacgcaccagcgtcgaggggatttagggcctttgatcactcaaaaccaaatgtaggagggggtttgcccccgattgcagtggatcagtcactggtgttgtgactggcagactgcaatcgggagcaagccccctcccacattggaactgcgttcggcgtcatagaccgcggtatttttcgttcagtgcatacaaaatcgcgcaggtctccgcatccagaaacccgcagtaatcccgcgcccgaaagtgcatctgaaacgcccgcgtcctctgttcaaacccttgccgattcttcgccggcgcatagccatagcgttgaaacgcccgctccacctcgacctccggcggcaggcccaggcaaaaccggcgctgatacatcgcccgcgtcgcctcatcaaaccaggcccccacccctgcttcatgcagacaccgccaaggcaggcgcggccccggatcgctcttgcgcccgaacgccacgtccgcatgcccgaggaggtcggtgggcccgatctgcgggtatcgcccaagaatgtcgcgaaccagcgcaatcaatacgtcgacctgttcctgcgcgtaggcaggaaagctgaacacgccaccgtcatcccgcgccaggttgacgatctcgatgccaatcgaacggctgttgaggttgtcgcgccccgcccaatgactcaccccggcgtgccaggcacgcttgtcttcctccaccaaccggaagacacgcagctcttcatagcccgccgcgcgatagtcgggctcatcagggtcgggcagcaagtagtgggcactcaccccatcctgagtcagggtacgcagggaggcaccaaaaggcgctgcggtgtaatgcaggatcacctgccgcacgggctcgccgttgcgttcgttgaagcctctggcagggaaactggtatcgatgaccaacatgagaaccgtccttttcaatacaggccgagtcgttcagcccgttcaagcgcaaaaaaattaccgccatcctgaaggcttgaacttcaggagggcggtaactatttggcacttgaaagaaaagtgatcagcagcgcaacggcatgcccaggtcgacgcgcaaaccatccggccgactgtcgaatttcaacgagcaggaacagcgttgcacgatcgcttgcacaatcgccaggcccaggccacagccttcgctgttaccgttgcgccagaagcgttgggtcaggtactgcaggtcctcggcggcaatctgtttgccgtggtcacgcacgcggaacaccacattatcggcttcggtgaacacgctgagctccacccgggtgtccgtcggcgtgtggcgcaacgcgttgtccagcaggttgcgcaaggcggcgacagcgaggcccaccggcatccccaccggggtggccgagaggttgtccggcaggatcaggtcgatgcgcgagttgtcaccggcattggcatcctggatcgccaggcgcgctacttcttcggcactggagtgcatgccatcgtcaaacgacaggttgccctccacccgggccagcaacagcaattgctccagggtccgatgcaggcggtcggcgccctcctcggcatgggccagggactggtcgcgggccgcgccctcggtcatgcgcgccacttgcaggtgggtcttgatcgcggtgagcgggctgcgcagttcgtgggcggcgtcaccggtgaggcggcgctcgcgctcgatggtcttggcgatgcgttgcaacagctggttctgggtgtcgagcagcggctcgagttcgctgggcaacgggtggatctgcagcggttcaagggagtcggcactgcggcgcatcaaggcgtcacgcatacggttgagcggcagcaggctctggccgatgcccagccacaacaggcacaggcagcccagcatcgccacgcccaccggcaccgacgctgccagcaggatcgacaggttcagcgcctcgcgctccacttgccgatcggccgtggtgatcagcaggtcaccccgggacagggtgaaactgcgccagcccacgccatcgacgacctggtcgcgaaacccgctcttgcgcgactccaacccctcatccggcgtggtgtggctgcgcgccaggatttccccgcgcagggaactgacctggcaggccatgccgccgggcacattcaattgttcagcgctgaaatgcgcgccgccgctgacgctggccaggcccggcatctgttcggtcagccccgccaccatgcgtgccgacgccaccaggcgttggtcgagggagaacatcatctggttgcgcaggtcgttgagcatccaggccgccgccagggcccagatcagcacaaaggcggcgcccagcttgaacgtcaggcgcagacgcaggcttttcacgatgcgtcctcgcctccatcggccgggccaaggcgatacccgaggccgcgcacggtctcgacgatgccattgcccaatttgcgccgcaggtggtggatatgcacgttgagcgcgttgctttccagctcgtcgttgaagccgtagacgctgtccttgagctgttcgctggagagtacccggcctttgttgtgcagcagggcttgcaacagcgcctgttcgcgacgcgacaggtcgacgggctcgccgcccaggaaggtttcgcgactgctggggtcgtaagccaggcggccatgctcgatcaggttgacgctgcgccccgccacccgtcgcaacagggtttgcaggcgcgcggcgagttcgcgcaggtcgaagggtttgagcaggtagtcatcggcgccggcttgcaggccgtcgacgcggttggtcaccgagtcccgcgcggtcaggatcagcaccggtatctccagaccctggctgcgctgttgctgcaacaacttgaggccgtcttcgtccggcaggcccaggtcgagcaccatgatgtcgaacgtcgccgccttgagcatcgcgcgtgcggcaccggccgtggccacgtgttcgacggtgaaaccctgggcggtgaggccggccacaatgccgctggcgatcagtttgtcgtcttcacagaccagtacgtgcatggtgaacccttcatgaaagatggggagattaaaggggctgcggattaagcgcagattatgccgctaaacaccccacactcaatctagaatagccgtggttaatcatcggttaatcaacgccacacattgtgtgcctacttgcatcgaactaaggcctgaccatgcggcatctgtttacctttctgctggtgttgttcgcggggctggcccaggccgcgccgggcaacccgtttgagaccaaacccgatttcctcccggtgggcaaggccttcacctttacctccgaacgtcttgaaagtggcgagacccagttgtattggcagattgccgacggctattacctgtacaagcagcgcatgaaattcgacggcctggccgaaaagcccgtgctgcccaaaggcgaggcccacaccgacgagttcttcggcgaccaggaagtgtatcgccaaggcctggaagtgaagattcccgccggcgccaccggccaggtcaagctgggctggcagggctgcgccgacgcgggcctgtgctacccgccgcagtcgatcaccgtggacctgggtggcaaccccgccgtcgccgccaccgcacaagcccaggaccagagcctggccagcggtttgcaacagcgcagcctgggctggagcctgttgatattcttcggcctcggcctgttactggcgtttgcgccgtgttcgttgccgatgttgccgattctcgccggcctggtggtgggcagtggcgccagcccgcgtcgcggttttgccttggcgagcagctacgtggtgtgcatggcgttggtgtatgcagcgctgggcgtattggccgcgcttttgggtggcaacctcgccgcttggctgcaaacaccttggattctcggcagcttcgccgccctcttcgtggttcttgccctgccgatgttcggcttcttcgagctgcaactgccggccttcctgcgcgaccgcctggacaacgtcagccgccagcaaagcggcggcagcctggtgggggcagggattcttggtgcgctatccggcctgctggtgggcccgtgcatgaccgcgcccctggccggcgccctgctgtacatcgcccagagcggcaatgcgctgcacggtggcctgatcctgttcgccatgggcatcggcatcggcattccgctgttgctgctggtgaccgtgggcaaccgcttcctgcccaagccgggcacctggatgaacgtgctcaagggcatcttcggcttcctgttcctcggcaccgccgtgttgatgatccgcccggtggtcggcgaaaacctgtggatcggcctgtggggcgtactcgcgctgatcatggcctactgcggctggaccctggcccgcgaatacggtctggccgccaaagtgtttggcgcaggttccctggtactgggcctgtggggcgcggtgctggtggtgggcgcagcggggggcagcgacgacctgtggcaaccgctgaaggtctacagcggttcacgggtcgccggcgcagcgtccgcccacgatgccttcatgaccatcaacgacccggccgtgctgcaaagccagctcgacagcgccaaggcccaaggccaatgggtgttggtggactactacgccgactggtgcgtgtcgtgcaagatcatggaaaaacaggtgttcggcaaacccgaagtcatgcaggcactcaaagacgtacgcctgctgcgcctggacgtcaccgccgacaacgccgccagccgcgcgctgctcggccgctacaaagtgcctggcccaccgagcttcgtgtggatcggcccggacggtgaagaacgccgcgcccaacgcatcaccggcgaagtggatgccgccgctttcctgcaacgctggacgcaaacccgagacgctctctgatgctgaccctgaccatcggcaccttcgccatcgccctgaatcacatcctgctgatcagcgcgctgattctcgccaccctggtgggttggcgcgtggccaagcgtggtggtgaaaacccggaatcggtgctgttcagcctgttcctgctgggcatgctcgctgcccgcgtcagctttgtgctgatgtactggagcgactaccgcaacgactgggtgcagatggtcgacctgcgcgacggcggcttccttgcctggcccggcgtgatcgccctggtcttgggcgctctcgcctacggctggcgccgcccagccctgcgcaagccactgagcgccggggtgatcaccggcctggtgttctggggcatgaccagcttgtccctgagcctgtatgacaagggctcgcagttgccggagataaccctgcgcaatgccaatggcgaggtggtgcaattggccgactacaagggcggcccgctggtgatcaacctgtgggccacctggtgcccgccgtgccgccgcgaaatgccggtgctggagcgtgcccaacaccaacgtcccgacgtgaccttcctgttcgtcaaccaggccgaaagcatgcagagcgtcagtacctttcttgcgacccagggcctgacgctggacaacgtgctgttcgacgccagcggccgcctcggccaggccgtgggctcgatggccttgccgaccaccttgttctatcgagccgatgggcgcttgatcaacagccacctcggcgagttgtcccaggccagcctggcccgcgccatggaacccttcgacaccgcccctgaaaggaaaccgacatgccaagcctccgccacctgctgaccctgctgccgctgacactcgcggccaccctggcccaggccgaagactggcccgcaccgatcaaacagatcgaggccaagggcgccaagatcctcggcaaattcgacgcccccagcggcctcactggctacgccgcccgctaccagaaccgtggcatggccctgtacctgaccgccgacggcaaaagcgtgatcgccggcaacctgtacgacgcccaaggcaacgacctgagcagcgcgccgctggaaaaactggtgtacgcaccgatggcaaaggaagtctgggccaagatggaaaaaagcagctggatccaggacggcgacgtcaaggcgccacgcatcgtctacctgttcagcgaccccaactgcccttactgcaacatgttctgggaacaggcgcgtccgtgggtaaaggccggcaaagtgcagctgcgccacatcatggttggcatcatccgcgaagacagcccgggcaaatccgccgcgctgtttgccgccaaagacccgcagaaagcgttggaagaacatgaggccgccggtaaaggcagcaagttgcaggcgctggccaagattccggcggatatcgaggccaagcttgatagcaacatgaagttgatggatgagctggagttgtcggcgacgccggcgattttctatctggatgacaagggggggttgcagcagcagcaaggggcgccttcgccggagaagttggtgaagatacttgggccgaagtaggcggcgccttgactgacgccatcgggggcaagccccactcccacattagaaatgcgctccaaatgtgggagggggcttgcccccgatgaggccctgactgacagcgaaaattaaagcccctccaactccgccatcaaatcactcaaccgatccaccttctcggcactgatctcattcgccgccaacccctcgatatactcggccaactccgccaccgtgctgcactcgaacatcgcccgcagcggcacatcccgctgcaaggtcttctgcacccgcgaggcaatctgcgtggccagcaacgaatgcccgcccagttcgaagaagttgtcctgcacccctacccgctcgactttcagcacttcggcccagatgtctgccaaggtggtttccagctcattgcgcggtgccaggtagtcctggctgtgcaactggccgatctccagcgccggcagggccttgcggtcgagtttgccgttggcgttgagcggcaggcggtcgagccacagccagtgcaacggcaccatgtattccggtagctcggcgcgcaggcgttgcttgatgcggtccaggcgttcgcttgggttcagtgcctcatccgccgccaccagatagccgaccaggtgcttgccgttgacgccctcctgcacacccaccgccgcgtcgcgcacttccggttgttcgtgcaggcgcgcttcgatttcacccagttcgatgcggtaaccgcgaatcttcacctggtggtcgacacgtccgacgtattccagcgcgccatcactgcgacggcgcgcgaggtcgccggtgcggtacaggcgctcgcccggcgcaccgaacggattcggcacaaacaccggcgcagtgcgcagcgggtcactgacataaccgcgaccaacgcccgtaccggcgacgcacaactcgcctaccgcaccttggggcaccagctccagcgcaccatccaacaggtacaaacggttgttgtcggtcggcgtgccgatcggcagataggtgcctcgggtcgacgccaggtcgacgcgataaaacgccacatcgtccgagcattccgccgggccgtaggcattcaccagcccgatctgcggataacgctgcaaccattgatgcgccagttccggtggcatcgcttcaccggtcggcaacatccagcgcaggccgtccaggccgatacggtcctgggccagcatgccctggatcagcgacggcacgctttccagcacggtgatgccctgggcctgcacatgttccaacaggccctggggatcatgcgcgatagtgttcggcacgatgtccacccgcgcaccgaacaacggtgcggcgaggaactgccacacagaaatatcgaagctctgcgaagcggtctgcgcgatcacatccgcgtcactcaaggccaggtacggcaccttgctcaactggttattgagcatgccgcgctgttccaccatcacgcccttgggcaggccggtggagcccgaggtgtagatcacgtaggcgaggttgtccgggccgctgtagattcccgggttttcaccacgtgccggtatctcttcccacaccagcaattggcaatcgaagccgtccagcaactcgatggcctgctcgcggcacacctcggtgcacaccagcagcggcgtgcggctcaggtcgatgatgctgcgcagacgctggcttggcaggcctgggtcgagcggcaggtagccggcaccggccttgaagctgccgatgatcatgcccagcaggtcaaggttacgttcgcccagcaacgccaccggttgatcgaggcccacgccggctgcaatcagcgcatgacccaggccgttactgcggcggttcagttcgtcgtaggtccactgctgatcgaggcaactggcggcgatgcgctgcggatgcgcggccacctggtcctcaaacaactcgacatagctgcgctccagcggataggcgtgctcgctctggttgcagccctccaccaggaactggcgctcctgttcgccaatcaacggcaagtccgccatgtcgccatggaagccctgcaccagcgccagcagcaggcgcttgaactcgccgagcatggcttgcacggtggtctcgtcgaagtagcgctggtcgtaggacaggtgcagccccaggtcatcccccggatagcacacggccgtcagcgggaagttggtgtgggtgcggccggagtccgaggtggcattcaggctttgtgcacggtccagcaccgagacttccaccggggcgttttcgaacacgaacaggctgtcgaacagcggctggcccttgggcagttcgctgtgttcctgaatcgtcaccagcggcaggtattcgtactcgcgcagttgcatattgctgtcgagcaagccgctcaaccactggcgcacgctgcaacgctggtcgtcctcgggcagcttcacccgcagcgcgatgctgttgatgaacaggccaacggtgcgctgcatctcgggcatctctaccgggcgcccggccactgtgacgccaaacagcacgtcacggtcgccacttaaacggcgcaataccagcgcccacgctgcctgggcgaaggtattgaccgtcagttggtgagcctgggccagctcacgcaattgtgcaccgtcgcgagcgtcgaggcgggtgtaacagtcgcccaccaccatgccaccgtggccggcgtggtcacgcaggaacggccggtcactcgggattggtgtggtgcgctcgaaaccttgcaggttgtgctgccaccactgacgtgcttcgctcaggttctggcgttgcagccaggcaatgtagtcgcgatagcgcggcggtgtggccagttgcgcctcgcgcccctcgccgagggccatgtagatctcgaagaagtcattcatcagcaacgaacggcaccaggcatcgatgaggatgtggtggttgctcatcatgaaccagtagcgctcggcgccgacgcggatcaggcgcaggtggaacggggcctggttgagcagatcgaaaccggcttcgcgctcctgcttgagcagtgcttgcaggcgcggctcatgttcgctttccgggtcagcactccagtcgaggtattcaattggcgtgctgcccggtgcgtggatcacttgcagcatgtcttcgccgatgttccagcagaacgaagcgcgcaaggcttcgtgacgggcgatcaccgcctgccaggcctgggcgaaacgctcggggtcgagggcgctgttgatgcggtagcggtcctgcatgtagtagaggccggtgcccggctccagcaaggtgtgcagcaacaggccttcctgcatcggtgtcagcgggtagacgtcttcgatgacactggccggcaccggcaggctgtcgagttgcgcctgggtcagatgggccagcgggaagtcggacggcgtgaggccaccggcatcgtcctgcaagcagtgccgggtcaggctgtgcagttcggccaggtaggcctcggccaattcacgcaccgtgtgctgatcgaaacgctcacggctgaaggtccagcgcagcaccagttcgccgccgtacacctggctgtcgatgctcaactcgttgggcagcggcgcgtccgggtcatgggccaggccggcggactcgtccagcgggtggaacagcgcatcggcgccgaagctctggtcgaactggccgaggtagttgaaggtgacctgcgcgctcggcaaggcggccatgctgtgcttgcacacatcatcggccaggtagcgcagcacgccataacccaggcctttatgcggcacgccgcgcagttgctccttgatcgccttgatcgaatcgccctgcccggcctgcggggtcaggcgcagcgggtaggcactggtaaaccagccgacgctgcgggtcaggtcgatgtcatcaaacaggctttcacggccgtggccttccagctggatcagtgccgaagcatggccagtccagcggcacagcacacgggccagggcggtcagcagcaggtcattgacctgggtgcgataggcactcggggcctgttgcagcaactggcgggcgtgttcggcatccaggcgcacgctgacggtgtcggcatcgcggttgcgcaacgaaccgtgcgggcgagtcaccggcaaccccacttccggtccggccaattggtcctgccagaggctcaattcttcacgcagggattcgctgccggcatacgcctgcaaacgcgcggcccaatcacgcagggcactggtcttggccggcaggctgaccgattggccgtcactcagttggcggtagaccgtttgcaggtcttcgagcaggacgcgccaggacacgccatccaccaccaggtgatggatcgcgatcagcaggcgttgctgcccttcgggaccgtccaccagcaaggcgcgcagcagcgggccgtgttgcaggtcgaggctgcgctgggtgtcggtgaacagcgcggtgcactgcgccatatcacgcacttgcgcctgcatcagcacgccgccttccggcacggccagatgctcggcgtgccaccgcgcgtcgcgctgggagaagctcaggcgcagtgcatcgtggtgttccagcaccgccagcagcgcttgctccagacgatggggttgcagcagttgcaggggcttgagaaccagcgcctggttccaatgctgacggttagggatctcgttgtcgaagaaccagtgctggatcggcgtgaggcccgagctgccggtgagtacgccttgctcggcggtgatctgctcggagcgcgaggccacggcggccagggtttgcacggtctggtgctggaacaggtcgcgggggctgaaatgaatcccggcctgccgcgcacggctgaccacttggatcgacaggatcgagtcgccacccagttcaaagaagttatcgtccaggccgacttgctgcacattcagcaccgcacaccagatcgcggccaacgtctgctcaagctcgttgcgtggtgctacataggtctggcgattcgcctcgggatccggttgcggcaacgcacgccggtcgagtttaccgttggaggtcagcggcatgctgtcgagcacgatcaggtgtgcgggcaccatgtagtccggcagttgcgccttgagatgcgccttgagcgcatcgcgcaatgcgccgtgctcggcatcgctgaccaggtacgccaccagctgcttgccactcggcgaatccagcgccagcaccaccgcttcacgcacggattcatgttccagcaggcgggtttcgatctcgcccagttcgatacggaagccgcggatcttcacctgatggtcgatacgccccaggtactctaccaggccatcggcgcgttggcgcaccaggtcaccggtgcggtacaggcgcgcaccgttgctcgcaaacgggtccgcgacaaaacgctcggcggtcatgcccggacgctggtgataaccctgggccaggccggcgccaccgacgaacaactcgccggtcgccccttgcggcaccaatgccatgtcggcatcgagaatataggccacgcgctcaccgatgatgctcccgatcggtacgctggccgcgccctcctccaactgctcgggcgcgaggctggccagtggcatcaccacagtttcagtcgggccataggcgttgaagaacacctgcggctggaacgcggcgcggatgcgctgcaagtgttcgccggtcagcgcctcgccgccggtgatgcacatgcgtaccggcaacgtctgctgctgggtcgccagccattgcgccaactggctgccgtagctcggcgtaaagcccaggatagtgatgcgatagctgcggatcagcccgcagatttcttctgcatcccactggccctgggcccgcaacaccacctgcgcaccgctgagcaacggcaccaacaggcgctcggtggcggcgtcgaagttgatcgaatagaagtgcagctcacagtcgtccgggcgcatgccgaaccgctcgatcaccgccgcgcaatgcatggcgatttcaccgtgggccaccaccacgcccttgggcttgccggtagagccggaggtgtagatcaagtacgcctgatggtgcggcaggctgataaacggcagctcatcggacgggtagttggcgagtaccggcaaatcatcttccaggcaccagcacgccacggtcgccggcaattcgcccagcgcttcgaacatcgctgcgtcgctgagcagcaggccgatgccgctgtcttcgatcatgtaatgcaggcggtccagcgggtattccgggtccagcggcacataggcgccgccggccttgaggatcgccagcaggccgatgaccatttccagggaacgtggcagtgccaaccccacacgcacttgcgggccgacgccacgctcgcgcagcatccaggccaggcggttggcgcgggcgtccagttcgcggtagctgagggtcacgccggcgaaggtcaacgcgggcgcatcgccacgggctttcgcctgctgactgaacagcgtgtgaatgcactgatcaaggcggtgctcgcccgcttcgacgcccaggctgtcctgcaacgcgcgctgttccgtggcgctgagcaacggcaattcgctcaggcgctgctcgggactggcgatcagcgcttccaacagattgcgccaatgttccgccatgcgcgcaatgcgcggctcgtcaaacaaatcggtgctgtaggtcaggcagcaacccagacgatggtcaaggtcggtgacttccaggttgaggtcgaacttggtcgcccgcgcatcgttggccaggtactcgacggtcatgccagccagttggcggttctgctggaattcccagcgctgcacgttgcacatcacctggaacagtgggttgtaggccgcgctgcgcggcggttgcagggcttccaccaagtggtcgaagggcaaatcctgatgggattggccttcgatcacagtgtggcgcacctggtcgaacagttcagccacgttcatctgcccattgagctggcaacgcagcacctgggtgttgaggaacgcaccgatcagcccttcgctttccgggcggatgcggttggccacgggcgcgccgatgcgcaggtcggtctggccgctgtagcggtagagcaacacggccagggtggcggtcatggtcatgaacagggtcaggccgtgttcggcgttgaaagcacgcacgcgggcggccaggtcatcgctcaaatcgaagcggtacaactcgccccgatggctttgcacgggcggacgtggacggtcgccaggcagttcgagcagcggatgttcggtgcccagttgccgagtccagtaatccaactggcgctgacgttcacccgcttccatccactggcgctgccacacgctgtagtcgaggtactgcaccggcaacggcgccagcggcgacaggcgttcgtcgataaaggcttcgtacaacgcgctgagttcacgggcaaagatgtccatggcccagccttcggtgacgatatggtgcagggtcaacaccaggtaatgttcgcgctcggcggccttgaccaggcaggcgcgcagcaacggcccggtttccaggttgaacggcgtatgcgcctcgtgatcggccagttgctgcaagcgctgctggcgttcgctttcgtccaacgcggagaagtcctgccagtccatgcgcaggccggtctgcgtcgagaccttctgataagccacaccgtcgatactcggaaaggtggtgcgcagggtttcgtgccgcatgatcagcgcttgcaacgccgcctcgaaacgccccacgtccagcacgccacgcaagcgcgccatgccaccgacgttgtaggccgggctgtccggctccatctgccagaggaaccacatgcgctgctgggaataggacaacggcaccggctggctgcggtcgaccttggcgatggcggtttgttggttgcgttgccccgacgcctggatcagcccgacctgttcggcaaaagcgcccaactcgctggcttcgaacaaggtgcgcaacggcaactcgacgtcacacgcctggcgggtgcgggagatgatttgcgtagccagcagcgagtggccgcccagggcgaagaagtcatcgtgcaggccgattttcggcagaccaaggacttcgcaccagatctcggcgatctgctgttgcagcggcgtttcaggctcgacgtgctcacgggtttgccacaccggctccggcaacgcgcggcggtcgagcttgccgctggggctcaacggcatggcgtccaggcgcatcagcagcgccggcaccatgtactccggcagttcggcggccagggcgctcttgacctgctgttcgcccagttcggcatgggcggtgtagtagccgatcaactgggcgtcacgcaccagtaccacggcctgggcgatgccgtccagggcgagcaggcgcgcttcgatttcctccggttccacgcggaaaccgcgcagcttgacctgttggtcgagacggccgaggtactcaagcacaccgtcggcgttccagcgggcacggtcgccggtgcggtacaggcgcgttccttggtggtcggcgacaaagcgctcagcggtcaacccaggacggccgaggtaaccccgcgccaggccgataccgccgatgcacagctcacctggcacgccaacgggcacggggttgagctgctcgtccagcacacggcagatcacattgcccagcggacggccaatcggcgagcgttcgccatcctcggcgcggcagtgccagtgggtcacgttgattgcggtttcggtcgggccatagcggttgtgcaattgcaccgccggcaactgggccaacacgcggttgcgcagctcggcaggcaaggcttcgccaccggagaacaggcggcgcaggctggtgcattcggccaccagcggttcatcgataaacagctgcaacaacggcggcacaaagtgcagcgtggtcacgccgtgcgcctgcaccaactgcgcgatgcggtgcgggtcgcgatgctcgccggggccggccagcaccaggcggcaaccgctgatcagcggccagaagcattcccacaccgacacgtcaaaactgatcggcgccttttgcatcagcacatcgctggcgtcgagttgataagtggcctgcatccactgcaagcgctcggccaatgccgcatgggtattgcccacgcctttgggctggccggtggaaccggaggtgtagatcacataggcaaggttatcgccgtgcaggtgcaggccgggcggctgggtcggccagctgtcgaggtgcaggctgtccatggcgatcacgcacacgccttctgcattcggcacttgctccagcagggcggtctgggtcagcagcaggtggacgccgctgtccttgagcatgtaggccaggcgttcggcggggtagtccgggtcgagggggacataggcaccgccagccttgatgatcgccagcaggcctatcaacagttgcggcgaacgctcggcggcgatggccacgcacacgtccgggccgacgcctttgtcgcgcaggtaatgggccagacggttggcctgggtgtgcagttgggcgaaggtcaggctgccgccgtcccagaccagcgcggtgtggtctgaagtctgctggctgagcaggtcgggcagccactgttgagccggcgcgcagggggcttcgctgtaacgcgcctgttcgtcgtgctgcatcagcatgaggtcgccgatggcttgctcgggctgttcgcagacagcgtgcaacaggttgatatagtgctcggccaggcgctggatagtcgcgttttcgaacagctcatcggcgtagtcgaacgacaggctcaagcgcccgttgcggtcctcttcggtgtgcagttgcaggtcaaacttggcttcacggctgtgccacggcagctcgtcggcgagcatacccggcaggcggcgcaaggcactgaggtcgcgttgctggtggttgaacatgacctggaacaggccctgttcgcgggcttgcgggaaagcttccaacagttgctcgaacggcaggtcctgatgggcctgggcgcccaaggccgtctggcgcgtggcggccaacagctcgttgaacggcaggcgcccatccagctccgcacgaagcaccagggtgttgatgaagaagccgaccaggccttgggtttcctggcgcgggcggttggcgttgggcacgccgatgcggatatcgcgctggccgctgtagcggtagagcaggctctggaacgctgccagcaacagcatgaagggcgtggattcgttggcctgggcggtctggcgaatggcttcgctgaggctcgcacccaagcgcacgctatggcgcgaggccgtatggcggtggtgtgccgagcgcggatggtcggtggccaggctcaggctcgggtgttcttcacccagttgcgttttccagtacgccagttggcgctggccttcgccttcggccagccattggcgctgccaactgccgtagtcggcgtagtgcagggccaggggcggcaacgccagagtctggccctgggcagcggcggcgtagaggcgtgagaattcatcgataaggatattcagcgaccagccgtcggcgatgatgtggtgcagggtcaccaacagttggtggtcttcatcgtccaggcgcaccagggtcacccacagcagcgggcctttttccaggtcgaactgggtgcgcgcttcgtcttcgcggatctgttgcgcacggccttcacgctcggctgcgggcaggtcgctgaggtcgatgatctgcaggtcgaaatcggccttggcagcgatccgctggaaagcctggccgtcgcgttcgtagaagcgcgtgcgcagggcttcgtggcgctggatcaactgctggaagcttgcgcgcaccgcgtcttcgtctaactcaccgcgcaggcgcagggcaccagggatggtgtaggcgctgctctgcgggtccagttgccaggtgatccacaggcggttctgtgccagggattggggcagttcctcgtgacgggacaggtggtggatcacgccttgggcgacgccgccatcctgctgcaattgcgcgacagtcgcggcaaaaccttgcagggtcggcgcttcgaacagcaggcgcaggctcagctccaggccaagggtttcacgcaggcgcgcgaccacttgggtggcgctgatggagttaccgccgagcaggaagaagtggtcatcggccgcaacggtcgcgacctgcaactgttcgcaccagatcgcggcgatctggttttgcaggtcggattccagcgccccagtgcgcgcctgcgcttgcagatcggggaactgcgcatagcggtcgaggctgccgtccttgtgacgaagcgcacacgccgcgcgttgcaccttgccgctggaagtcttcggcaacgcgccggggttgagcagtaccaccacgctcggcgcctcctggtacgcctcggcgacggcctggcggatcgccttgatcagcgcttcgggcggcaggattttctgcacgctgcggctgatttcggcggcaatgccgatgccttccaggccctgatcattcaccgcaaacgcggcgacccggcctttgcgcaccacttcgacttcgcgttcgatggtctgctcgatgtcctgcgggtacaggttgtggccgcgcacgatcagcaggtccttgaggcggccggtgatgtacacctcgccgtcccggataaaccctaggtcgccagtgcgcagccaggtacggccggcgtgttgcacgaaggtcttggcggtggcctcgaggttgcgccagtagccgtgggcgatgctcgggccgctggcccagagttcgccgacgtggttgtcgggcagttcggcgaggctgtgcgggtcagcgatcagcacagcgtgttcaggctggctggtgccgcaactcatgatcgcactgccctgccccggctcggcgcggttggcggccagggcctgctcgtcgacgcgcagcgcgggaatgccatggccacgagtgccaccggcgacaaacagggttgcttcggccaggccgtaggaggcgaagaaattattcggggtaaaaccacaggcggcgaacttctcggcgaagcgttccagggtgtcgatgcggatcggttcggagccggaatacgccacgcgccactggctcaggtccaggcgttccagggccgagtcgctgacccgctcactgcagaggcgataggcgaaatccggcccgccactgatggtgccgccgtattcgctgatcgcttccagccagcgcaatggccggccgagaaagtaggccggcgacatcagtacgcacggcacgccactgaagatcggttgcagcaggccgccgatcaggcccatgtcgtggtacagcggcagccagctgacgatcacgtcgtcggggtttaggtcgatgccgaaaccgcgccggatcagcacttcgttggccaccaggttgccgtggctgacttgcacccccttgggcagcgcggtggagccggaggtgtattgcaggaaggcgatgtcatcggggtgcaggtcgggggcggtccagtcgccagcgctctgcaaggtatcgacgctcaggaccggcggcgcgttgtcgatctgcgccaggccatcggcgagactggcgatggtcagcaacaggcgcggctcggcatcgctgatgatcgacagcaggcgctcctggtgatggcggcgggtggactccggcggatacgccggcaccgcgatcacccccgcatacaggcaaccaaagaacgccgcgacataatccgcgccgctggggaacaacaacaccgcgcggtcgcccagttcggcattggcctgcaacgcagcggcaatggtgcgggcgcgcaggtcgaggtcgcggtaactgagcacaacgctgtgctcggcggattcggcgaggaagcgcagggcaacctggtccggggtctgcgcggcacgacattgaagggactggaccagggtgcggggaagttcgaaggcgtccatcatggggttcctgcctgaaatcggcttacgggaaattcaacaattcggggggggttgttcagccgacggcgagtggccgcgccgcgtcgttgcgccagcgggccaggtgttcgtcggcgtagcgccgcacgcagcgcagcacggcgctttcgtgttgcacgaggaagaagtggtggccgtcgaacatgtccagggaaaagccgctggcggcgtcgagttgccagtcgagcaactggtcggcgcgcacgctgtcctgcttgccgccgaacacatggatcggcatgcgcagcggcgcacgctcgccgtaggtgaagctgccgcacagcaggaaatcggcacgcaggatcggcagcatcaactgcatcaactcggggttggccagggcttcttcggtggtgccttgcagttcgcgcaagcgggcaatcagttggtcgtcggtcttttcgatggcgtactcgctgacatcacgacgggctggcccgggtgtgccggaggcgaacaaggcgagcggcgccggcacaccacgagcgttcaaggcatgggccaattcgaaggcgagcaggccgccgaggctgtggccgaacagggcatagggaccgttcagatcgcggctgatttcatcggcgagctgcgcggccagggccttgatatcgcgttgcaacggctcgtccatgcgcatgccacggccgggcaattccagcgggcatacctgcaaccactcaggcagcgcccggcgccaacgcgcatacaccatggcgctggcgcccgaatagggcaggcagaacagccgcagtcgagtcagcgtactcatcgagtgacgactccaaactgaaacacgctgtatgcacgatagaaacccatttcgtcctcctgcgggtgctgatccttggccgttttactaacggacctgtcacccagaagaacggacggcaccggcaaataattagtcgccgggtacaagcgagacgtggttcacaccgaacaagaaagcataagattagttcgtcttctcatttgacaatcattatcattcagcataatttgttgcccgatgtgtaggaggccccggcaaggacgccctcccctaacctcttttgcgacaaggtgatttccatgacggaacaagtatccacaggcaggtgcgactcaccgcttctccaggcattcgtcgataaccggctgattctggtgaagatcgcggcccgcattaccggctgccgctcccgcgccgaggatgtagtgcaggacgcctacttccggctgcaatcggcgccgacgatcacctcatcgttcaaggcgcaattgagttatctgttccagatcgtgcgcaacctggccatcgatcactaccgcaagcaggccctggagctgaaatactccgggacggaagaggaaggcttgaatgtggttattcacggcgcttcaccggaaacctcgcacatcaatttcaacaccctggaaaacatcgccgacgccctgacggagctgccccagcgcacccgctatgcgttcgagatgtaccgcctgcacggcgtgccgcaaaaggacatcgccaaggaactgggcgtatcgccgaccctggtgaacttcatgatccgtgatgcgctggtgcactgccgcaaggtgtcgggcagccatagcgatacgtttgcgcgcagggtttgacacacctgagactcagggtgggagggggcttgcccccgattgcatggggccaatcaccggtgttgtgactgcacagatgccatcgggggcaagccccctcccacatgtggttcggtggtatgcctgtcagtccgcgggcatcacatcaatgcgatacggctcgaaaatcttcagcatctcgccatcgtcgcgcaaacgcttgagcaacgcggcaaacgcgtcccccgtgatcggcgctttcgggcgcaacaacgcgtagtggtgatacacctggtcgatgcgctccgagaccaggaactgccccgccatctgcgcattgcgcaccatgaaatcactcaggtacgagcgcgtcaccaaggcgatatcggcacgcccgcgcgcgaccatcagcaggttgctgtcatgggagtaggtcaacgtggcgttgaagtgctcggccatgtacttggggtcggggttgaagttggcgaaggcgtagtgataaccgctgaacaccgccaggcgtttacctctcaggtcagcgaaataactttggtcacgaccgggctcacgctgggcgacgaagatttccgcatcttccaggcccatgtcgaccgacgtgtgggcaatctcctgccagccccaggcagggttttcgaagatcgccatatccacgcggccctgctcgaaatcgcgaaaacgtcgcgggatggaggtgggcaccaagacaaattggtagtcggtttgcgcggcgttcagggcttcgaccagttgcggcagcaaaccggtgtcggcaccctgctccggtcgcacagtgtagggtgggaaatgcgccgcgccgatgcgtaccaattgcgcagccgaagccggcatccaccacgcggtgcccagtgcccaaaaggtaagtcctgcagccagccgccatggcgaaaacatcaaggcacgcaccgttcaaaaacgctcatggcgataagctaggcgtttttgtctggagagacaactttccagcggtaaattaatagcttgcgcctcaatcggccttcaaaaccatcagcagggcttcttcggccaactgctccagcgtcaggctgccctcggcgcgaaaccaggtggtggtccaggacagtgcgccggtgaggaaacgccgcgtgataaatacatccccacggatgtagcccgcatccttggcctcccccagcacttgcagccagagcgcctcgtacacatcgcgcagggccagcacctgggcctggccttcggccgacaacgaacgccactcgtacaccagcaccgccatggcctcgccgctgccgcccatgatcgactgcaattcgcagcggatcagcgccagcacgcgttcgcgcacgttgctcgcctcttccagcgaagcgcgcatcatcgcggtgttgtagtggatggtttcttccatcactgcgcgcaggatctcgtccttgctcttgaagtgatgaaagatactgccggactggatgcccacggcgctggccaggtcgcgcacggtggtacgttcgaagcccttgttgcgaaacagatgggccgcggtttgcagcagcttgccccgggcactgtcggggtcggtcaattgcccgccatcgaccatggtgcgcatgacccgcagggctttgtgctcatccatgcctctctcctctacttccacggacgtcttggcccgcaatttaggccgtggcggccacccaagcaagcgcttggctgaaacttgtatccgcagtttacaaaccaagcgcttgcttggtagtctcgaccccagccattcgaggaaggatttctcatgagcaagacggttcgtatcggctgtgccagcgccttctggggcgacacctgcaccgccgccgcccaattggtgcagggcggccagctggattacctggtgttcgactacctggcggaagtcacgatgtcgatcctggccggtgcgcggatgaaagatccccagaccggctatgccacggatttcgtcgaagtgctcacgccgctgctggccgatatccagcaccagggcattcgcgtgatcagcaacgccggtggcatcaacccccaagcctgcgccaccgccctgcaaacggcctgcgacaaagccgatattcccttgaaaatcgccgtgttgctgggcgacgacctgcaaccccaactcaaacacctgcatggcatcaccgacatgttcaacggcagcccactgccgccgttgtgcgtgtccgccaacgcctacctgggcgcacccggcatcagccaggcgctgaagctgggcgcggatatcgtcatcaccggccgcgtggtggacagcgcagtggtcagcgcggcgctggtgcatgaattcgactggtcctggcaggattacgaccgcctcgcccaggccgcactggccgggcatatcatcgaatgcggcgcgcaatgcaccggaggtaacttcaccgattggcgcgacgtaccggactacgagcacatcggctttcccatcgtcgaagtcagcgccgacggccaattcaccgtcaacaaggtcgacggtacaggcggcttgatcagcgaactcagcgtcgccgaacaactgctgtatgaaatcggcgacccgcacgcctacctgttgcccgatgtgatctgcgatttcagccaggtcaaattgcagcagcaaggcaacaaccaggtacgcctgcacggcgccaagggcttgccacctaccgaccagtacaaggtcagcgccacttacccggacggtttccgctgcaccgccagttgcctgattgccgggatcgacgcggtcgccaaggccgagcgggtcagccaggcgatcatcaacaagacctcggaactattcagccagcgcggctgggcgccttacaccgaagtgaacatcgaattgctcggcagcgaagccacctacggcgcccacgccaggcgccaggactgccgcgaagtggtggtgaaactggcggtgcgtcaccccaacaaacacgcactggtgctgttcgcccgtgagattgcccaagccgcgaccggcatggcgccgggcctgaccggcatcgtcggcggacggccgacggtgtacccgttgatccgactgttttcgttcctgatcgataaaacggcctgtgacctggccatcgacttccagggcgagcgccacccctgcgcactgccacctgccgacaccccgcgcctgcccgatgcgtccatcgatccgcccaagccccaaggtcgcgccgacgccagcgtgccattggtgaaactggccgtggcgcgctccggcgacaagggcaaccacagcaatatcggcgtgatcgcccgccatcccgactacctgccatggatcgccgaagcactcaccccgccagtgatcgtcgactggatgggccatgtgctcgaccctgtgcacggccgcgtcgagcgctggtatctgcccggcagccacagcctcaacttcctgctggaaaacgcgctgggcggcggtggcatcgccagcctgcgcatcgacccgcagggcaaagccttcgcccagcaactgctggatatcccgattgccgtgccgcaacacattgccgatcaactcgcataacaggagcgttgccgtggccttcgactcgatcttcaaagccaacctgttccaggggcaaaccgtgatagtcaccggtggtggcagcggcattggccgttgcactgcccatgaactggcggccctaggcgctcacgtgatcctggtgggacgcaaggcagacaaactgcagaacgtcgcgatagagattgccgaagacggcggcaacgccgattggcaggtgtgcgacatccgcgatgaagaggcggtcaaggcgctggtcaaacacatcctgcatgcgcacggtccgatccatggcctggtcaacaatgcgggcggtcagtacccctcgccactggccgcaatcaaccagaaaggcttcgaaaccgtactgcgcaccaacctggtcggcggtttcctggtggcgcgggaagtgttcaaccaatccatgagcaagcacggcggcgccatcgtcaacatgctcgccgacatgtggggcggcatgcccggcatgggccactcgggggcggcacggtcgggcatggacaacttcaccaagaccgccgcgttcgagtggggctatgccggcgtgcgggtcaacgccgtggcgccgggctggatcgcctccagcggcatggacacctacgaaggcgcgttcaaggcggtgattcccacgctgcgcgaacatgtgccgctcaagcgcatcggcaccgagtcggaagtcagcgcggccatcgtgttcctgctcagccccgccgctgcctttatcagcggcagcacactgcgcatcgacggcgccgccagcctgggcagccgcgcctggccgttgcacaaggcgcaggcgccgagcgaacccttcaacggcttccaccgcgcctacttgccggatgtgctcaaggcggagcaatagagcatgccagtgattgaatccctgatcgacgcccacagcgcccaattcgcgcaaaaccgcgaagccatgctggccgccatcgcccaactgcgtcaactggaagacaccctgctgagcaaggcgcaggacgccaagcccaagttcgacaagcgcggccaactgctgccccgcgaacgcctcaacctgctgctggacccgggtgcgccgttcctcgaactggccagcctggccggctacaagctgcacgacgacaaggacggcagcgccgccggtggtgggttgatcgccggcatcggctacgtcagcggcgtgcgcatgctggtggtggccaataacagcgcgatcaagggcggcaccatttcccccaccggcctgaagaaatccctgcgcctgcaacaaatcgccatggagaacaaactgccagtggtgaccctcgccgaaagcggcggtgcaaacctcaactatgctgccgagatcttcgtcgaaggtgcgcgcagcttcgccaaccaggcgcgcatgtcggccatgggcctgccgcagatcaccgtggtgcatggctcggccacggccggcggcgcgtatcaaccggggttgtcggattacgtggtggtggtgcgcggccgcgccaaactgttcctcgccggcccgccgttgctcaaggccgcgaccggcgaagtggcgaccgatgaagaactgggcggtgccgagatgcacgcacaaaccgccggcaccgccgaatacctggcggaaaacgatgcggacggcgtgcgcatcgcgcgcgaaattgtcggcctgttgccctggaatgatcgcctgccacagacgccgaaacgtgcctacgcagaaccgctgtaccccatcgaagagctgctgggcctgatcccggacgacccgaaaaaaccctacgacgtccgcgaaatcctcgcgcgcctggccgacggctcgcacttcctcgagttcaagggcgagttcgacgcccacaccgtctgcggccacatgcacctccagggccgcgccgtcggcgtgatcggcaacaacggccctatcacaccgaagggggcgagcaaggccgcgcaatttatccaactgtgcgaccagagccgcacgccgctactgttcctgcacaacaccaccggcttcatggtgggcaccgagtcggagcagcaaggcgtgatcaagcacggcgcgaagatgatccaggcggtggccaatgcacgggtgcctaaactgaccattgtggtcggcggttcctacggtgccggtaactatgcgatgtgcggtcgcggcctggacccgcgctttatcttcgcctggcccaacagccgcacggcggtgatgggcggtgcccaggccggcaaggtgctgcgcatcgtgacagaggccaagcaattgaaggacggcctggtgccggaccccaaggtgctggacatgctggaacaggtcactgcgcagaagctcgacagccagtccaccgcgctgtatggcagcgcgaacctgtgggacgacgggctgattgaccctcgggatacacggaccttgctcggttttctgctggatatttgtcatgaggctgaggtgcggccattgcagcccaacagctttggtgtggcgcgcttctaatcaggagaacaataaaaatgatcttcacccaagaacaccaggaactgcgccgcagcgtccgcgccttcgtcgaccgcgagatcaacccccatgtggacgaatgggaaaaggccgggcgctttcccatccacgatattttccgcaaggccggtgaactcggcctgctgggcatctccaaaccggagaagttcggcggcatgggcctggactacagctactccattgtcgccgccgaagagttcggcaccgtccgttgcggcggcattcccatgtccatcggcgtgcagaccgacatgtgcacaccggccctcgcccgcttcggctccgatgcactgcgcgaagaattcctgcgtccggccatcagcggcgagcaggtcggctgcatcggcgtctcggaaaccgccgccggttccgacgtggccgggttgaagacccatgcgcgcaaggacggcaacgactacgtgatcaacggcagcaagatgtggatcaccaactcgcccagcgccgacttcatctgcctgctggccaacacctccgatgacaagccgcacatcaacaagtcgctgatcatggtgccgatgaacacccccggcatcagcgtcagcccgcccctggaaaagctcggcatgcacagctccgagaccgcccaggtgtttttcgacggcgtgcgcgtgccgcaacgcaaccgcatcggccacgaaggtgcggggttcatgatgcagatgctgcaattccaggaagaacgcctgtttggcgcggccaatatgatcaagggcctggagcattgcatcgacagcaccatcgagtactgcaaggagcgccagacctttggcaaggcgctgatcgacaatcaggtcattcactttcgcctggccgaactctccaccgaaatcgaatgcctgcgtgcgctggtctaccaggccaccgagcagtacatcaaaggccaggacgtgacgcgcctggcgtccatggccaagctcaaggcggggcgcctgggccgcgaagtcagcgacagttgcctgcaatactggggcggcatgggcttcatgtgggacaaccctgtggcccgcgcctatcgcgatgtgcggctggtgtcgatcggcggcggcgccgatgaaatcatgctgggcatcatctgcaagttgatgggcaccttgccggggaaaaaaccatgaacaccttgttgctcgaaccccacaacggcgtgctgcacatcaccctcaaccggcccgactgccgcaatgcgatgagcctggagatggtcaatgaactgcgcgcggtgttggcgcagttggatgtccagacgcgcgcggtagtgatcagcggcgccggcggacatttctgcgccggggcggatgtgaaggacctagtcacggcgggcaatcaactgcaggcgctgaaccgggcgtttggcacgttgctgcaagaagtcgaagcgctgtcgcaagtggtgatcgtcgtgctgcaaggcgcggtgctgggcggtgggtttgggttggcgtgcgtgagcgatatcgccatcgccgatcaccaggcgcaattcggcttgccggagaccagcctgggcttgctgcccgcgcagattgcaccgtttgtggtcaagcgcatcgggctgacccaggcacggcggctggcgctgacggcggcacggtttgatgggcttgaagctgagcggctgggggtggtgcactttaccgagcgcgacccgcaggcgttggcgcagcggttggatgacgtgctggggcaagtgctgaagtgtgcgccgggggcgaatgggcgtactaaagcgctgttgctggccagtgtggatgaaccgctggaggcggtgctggatcggggcgcgcagtggtttgccgaggcggtgcgcagtgaggaagggattgaggggacgcaggcgtttgtacagaaaagaaagcctcggtggtgcaaatgacgccatcgggggcaagccccctcccacactgtgggagggggcttgcccccgatgaggcccgatcagacaccccatcagccaagggataaacccatgcccgccttcaacaaaatcctgatcgccaaccgcggcgaaatcgcctgccgcatccagcgcaccgcccaagccctgggctaccgcaccgtcgccgtctacagcgatgccgacgcccaagccctgcatgtgcagatcgccgatgaagccgtccatatcggcgcggcccccgtgcaacagtcgtacctcaatatcgaggcgatcctcgccgccgccagactcaccggcgccgatgcgatccaccccggctacggcttcctctcggaaaaccccgacttcgcccgagcctgccaacacgccggcctgaccttcatcggccccagcgtcgaggccatcgaactgatgggcagcaaacgcctgtccaaactcgccatgcttgacgccggcgtgccgtgcattgccggctaccagggcagcgcccaggacgacgccaccctgcaacaggaagccgggcgcatcggctacccgttgatgatcaaggccagcgccggtggcggcggacgtggcatgcgcctggtgcaccagccagaagcgctgctggacaacctgcataccgcccgttcggaagcgaaaaatgcgtttggcagcgacgaactgatcctcgaacaagcgctggtcgagccgcgccacgttgagatccagttgttcggcgacagccacggtcagctgatctacctcggcgaacgcgactgctcggtccagcgccgccaccagaaagtcatcgaagaggccccctgccccatcatgacggccgagttgcgccaggccatgggtgaagccgcattgaaggccgggcgcgcggtgaattacgtcggcgccggcaccgtggagttcctgctcgaccgtagcggccgcttctacttcctggaaatgaacacccgcctgcaggtggaacacccggtgaccgagttgatcaccggcctcgacctggtggattggcagttgcagatcgccgcagggcaaccgctgccgttgacccagtcggaggtgaccctgagcggccatgccatggaagtgcgcctgtacgccgaagacccaacccagggctttctgccgcaaaccggcgaggtactgcgctgggaaccggcggccggcgtgcgcatcgaccatggcgtggtgcagggccaacgtatcagcccgttctacgacccgatgctgggcaagctcatcgcccacggcgccacccgtgaagaagcgcggcgcaaactgctgcgggcggtggaagacacgctgttgctgggcgtcgcaaccaatcagcaactgctggctgacctgctcaagcacccggactttatcaacgacgatttcagcaccgggtttatcgccgagcacttcagcgagataccgcgtccttctgtgtcgagcgaacagctcgccctggccgctgcactgttctacacccacagtgccgagcaacatccccacggtctgtcgggctggcgcaacaacgccagtagcccttgcacctaccgccttgaggtcaacggtgaaatccacaccgtcagtaccgaacccctgctgctcagcgccgacggtcgccacgccaccctgatgctcaacggcatccgtcgacgcatggcctatcatctcgaaggcgaccaactgtggctacccggcctgtgcgtgaccaaccgcacccagcaagtggccagccgccaggccgatgccagcagcggcacggtcaaggcgccgatggacggcgccatcgttgatgtgcgggtcagcgccggtgatagcgtcaccaagggccaactgctgctggtgctcgaagccatgaaaatggagcatccgctgaccgccggcatcgacggcgtgatcaagggcgtgcaggtgattgccggtgaccaggtgcgcaatcgccaggttttactcgagatcatctagccccctaggcggaactacagggccgggctacgctctatccccaacagaaagggaagagtacgggaacctgcgcgatgcctcattggctgattattgaccttgaagccacaacggatgaaggcggctggcccgtgacggagatggaagtcatcgagatcggcgcaagcctggtcaaccgccagggccgcgagctggatcacttccagcgctttgtgcggccgctgcgccgccccttgctgacgcctttttgccggcagttgacccacatcacccaggcgaacattgatggcgcagtgccaatcactgaggtgtggccgttgttcgagcgctggctgggccagcaccaggcgcgcctggagggttgggccagttggggtgactacgatcgcaggcaactggagctggagtggcagcgccatggcctggccagcgccctcgccaccacgccccatgtgaacctcaagcagcgcttcgccaaggcccgtcgcctggacaagcccctggggctcaacggcgccctgcaattggcaggaatgcagttccacggccagcaacaccgggcgttggaggatgcgcgcaacacggcgcgcctgctgccattgattttgccggtctaggcagcttccctggccttgggcatactggccgacctttccagacccttttccgaggaatcgcccatgttcaaagtcaacgagtacttcgacggcaccgtcaagtcgatcgctttcggcaccgcagaaggtccggcgaccatcggcgtcatggctcccggcgaatacgaattcggcaccgcccagcgtgaaatcatgcacgtggtgtccggcgccctgaccgtcaagctgcctgacgccagcgactgggaaaccttcgccgccggcagccagttcaacgtgccggccaacagcaagttccaactcaaggtcgccgtggacaccgcttacctgtgcgaataccgcggttaagggtttcccggaaacaaaaaaatgcccgtctcctgcgagacgggcattttttatgggcttggaaagctattcgagaatggtcaccggcatgccgacttccaggcggccgatgctatcgttgaccaggttctggccgaagatcgcgccattttcagtcttgcgataggtttccagcgtggcgaagggttcacggtcagcactgcgttcgccggtctgcgggtcgatggtggtgaggatgcagcgcgagcagggctttaccgcacggaactccacatcaccgatacgcaggcgtttccagccatcttcggcgaaggcggtgctgccttcgatcaccaggttgggtcgaaaacgcagcatctccatgggccggccgatgcgttgcgaaaggtcatccagcgaagcctggccaatcaccagcagcgggtagccatcggcaaacgcgacctggtcatcgtccttgccataaccggcctcggtggtgcgggcgcgttcgagggggatctgcaccagccgcgtcggcttgccgataaagtcactgacccaggccgctgcctcgtcgcctgcgtccggcacccgcaaggtgtcgcgccagatggtcacaccgcgcaactcggcattaccgcccggcagtgcgacatccagcggcgtgtaaccgggcgaactcaaggtgagcccaccgttgcggttccacagtgccgacagttgactcatcttggccacggcgcgctgcgtgaggaagcgcccgctggcttcgtccaccagcatccagcgtcgatccccatccaccccgagcttatccaggccgacctgttgcaggatttcggccttgccggacttcaaggggtaacggtacaacgcgctgagacgaagcatgagcctgcattcctgaggggcaaagccatcaccctaaggtcatgcgggcacttcgtccagcatcagacgctggcgcaccacgtccaccagcttgtcgggctggaatttggacaggaaattgtcgcagccgaccttcttcaccatcgagtcgttgaagctgcctgacagcgaggtgtgcaacaccacgtaaaggctgcgcaggcgcggatcgttgcggatctcggtggtgagacggtaaccgtccatctcgggcatttcggcgtcggtgaaaatcatcagcagtttgtcggtcatcacatggccggcgtcggcccaggccttgagcatgttcaacgccttgaggccgtcactggcgatgtgcatcttcacgcccagttggccaagggtgtcgcgcagttgcgagagggccacgttggagtcatccaccagcagcacttcgcggccgcgggcgcgctccagcaccgggtcttcgagtttctcgcgggaaaccttggcgttgtacggcacgatctcggccaggactttttctacgtcgatgatttccaccaactggtcgtcgaccttgctgatggcggtgaggtaatgctggcgcccggcactggtcggtggcggcaggatggcctcccagttcatgttgacgatgcggtccacaccgcccaccaggaaggcctgcaccgagcggttgtactcagtcacgatgatggtgctgttggggccaggcaccagcgggcgcatgccgatggcctgggacaggtcgatcaccggcagggtctggccacgcaggttgaccacaccgcacacgaaaggatgacgctggggcatcagggtcaacttgggcagttgcagcacttcctgcaccttgaacacgttgatggcgaacaattggcgccccgccaggcggaacatgaggatctccaggcgattctcacccaccagttgcgtgcgttgatctaccgtgtcgagaatgccggccattaaaagctcctgatgcgctgaggaatttgtgcggttcacataaggtgagttatcggcggcgaacgccagaccttgacccccgtaaaatgccacgtaaatccattgatgtcacactgacatcatgctttactgcgctggcctctccgtatggcaagaaagcgacgttgcgcgacattcaattcgacgcaaggttccgctatgtaagggattcccctacgcacaatcaggcccaacctgatattcgcaatatctaatagccattaatgtgacgccattctcaatgcatgaatggagtcaggcttttgtttgccatcccaagccctcggcccacgggccttccagacatacagatgtcggcaatcgaaggtgtgcaattgacccctttcatgagggcagcgcacagccgttgccgtcactctaataaacgtcctactgaaaactcagaagccgcctacaggtcccagtcatatttcggcgctatttttaagccattcacccagtgcgacatctcatcacccgaccttatgttgtggagacttgtatgatgaacagcgcaaatgaatggcaaaccacactccccgagttcctgcttgaagcagaaacgctgctggccaagtcggaagagtgcttgagccacctgcacctgattcgcgacgacagcgacgccatcgactgcatgaagtccagcctggccaaactggccgaaaaggccgacagcctggccctgcaggtgatcagcgagttttcccggcatatccaatacctgatcgccaatgcggcaagcccgatgcaactgcatgaccaggcgctggatgcactgcatgcgtgcctgacgctactcgcgtggcaactggaactgatcgatgtgcgtaccggcgaactgagtatggacgagagtgagcaggcgacattgattgcaaccgtcacgctgcagatcccgcagaaggatttcacttataaaccgcagcagcgtgtgcaccacgcctcttgagtggataacaagtcgtattcgaacccgaagttatctaaaaacgacacgactattaactcgttggacttgaacagcgcagacaaagatatcaattagccattaacggtaataacgatacaaccaaacagaaataatataacttccccactccatgaactctgggaataccgcccggagcatttgcgcggtcaataatccggtgaggcacggcaccaggcgaccaacggtaacagtggtggtactatgccccgctcgaagtgactcaacttcatcatgcataaaaacgattcgataacgcattccaaacagagccccgtcagccgcagtgaccggacttcccgcagcgcaccctcattggctccatccgctatgtacgccagcctcaagacactcatcgcaaggtccgcgtcccgcagcaatgcacgccgtttgatcctcgccctgtgtcttggctcgctgctgctgagcctctggacctattccagctccgaaccgctgccgttgctggtgattgcgcttaacctggccactctcgtggtggtcggcctgcaacaatggcgttcacgcaagtccatcaagttccagccccaggaactggccgatcgcctgttgcaggtacaggaaaacgaacgtcaccgcctcagccgtgaactgcacgacgatatcggccaactgctcaccgccgccaagctgcaaagcgaatggctcaagcgtcgcctgcccgacgacctgcaagcccagtgctcggtgctgtgcaacaccctgaatgaaaccctggccaaggtgcgtgacgtttccgccatcctcaaccctcgccagttggccagcctgggcctggaagccagcctgcgtgcacacctgctcaagaccctggaaaacactccgatccactggagcctggaatgccagcaacggctgaccggaatcccggaagaaatggcagtggcggccttccgcatcacccaggaagcggtgaccaacatgctgcgccacgcccaggcgcgcaacctgctggtacgcctgcaacgcttgcccgaaggcctgtcgctgaccatctgcgatgacggccagggtttctcaccgtccatcaatcccggcctggaaggccaacggggcatggccggcatgtccgagcggatagatcagcttggcggtacgttgtccgtcagcagccagcccggcaatgggacacggatcgaagcgcttttcccctgggcgcctcgcgccctcgaacgggccagttcccctaaggttctcgagtgagctgcaaattactcctggtagatgaccatgcactgatccgggccggcgtacgcgcgctggtccaggatattcccggctacacggtgatcggcgaagccagcgatggcgcgcagttgctggagcagttcagcgccctgctgccggatatcgtgctactggacctgtcgatgaagcacaccggcggcctggacgccttgcagcaactcaagcgcgcctaccccaagagcaaagtgctgatcctgtcgatgcacaccgacccggaactgatcatgtgtgcgctggagtccggcgcccatggctacctgctcaaggacaccaccgccaacgagctggaacacgcgctgctggccttgcgcaacaacgagcgctacctgagcccggcgatcgcccacaccgtgatcaaccaggcgctggtgcgcagccaggggccgaccactcccgccggccacagccacaacctcacggcgcggcagttggagatcctgcgcctgatcgtgcgcggcaagtccacccgggagatcgcccatgggctgggcctgagcatcaagactgtggaagcccaccgctcgcagatcatgaagcgcctgcagattttcgacgtggcgggcctggtgctattcgcggtgcgcgagcagatcatcagcctggacgactagcggcgaatccaccggcaagtgtacgcgcaaggccttgggcaaggcctcgaagtgcagatcatcgccctccagcggctcgccatccaggttgatgtacaagccctgtgcgaccttgatattcacccacggcaggcgcgcccgcacaaacatggtgtccaggccccagccgttgctcatcaactcgcgcaaggtgccgaccacttcctggggggccggcaggatgctgacgtccagcaggccgtcgtcggccatggcgcctggacatagctcatgcccaccgcctgcctggcgaccgttgccgatacccagggcgagcagctcgcctttccaatggaaatcggggccatccagctcggcgtaggcggcctttaactcgctgaatcgcgtcaaaccggtgaacagataggcggcgccgcccaggacttttttcaaatcctcggaggtgttggcggtgacctggctgccgaaaccgccggtagccatgttgaggaagatctgcccgccgacctggccgaggtcgatggccctgggtggcacgtccagcagcgccagcgcctggtcaggctccaacggtacgccggcggccttggcgaaatcgttggcggtgcccaggggcatcagcaccaggctggcttcggtgttggcctgagccatggcttcggccacgtcgcgcagggtgccatcgccaccaccggcgatgatgtgggtgtagccgtcggccagggcttcgttgaccaggcgctgggcgtcgccaccttcccaggtgacccgtacggccaactccccaccctgctcgcgccgggcctgcacggctgaacgcacgtcctcgttgagggcttgcttgccgtggaggatcaacagggctttgggggtggtcattggggaatctcctgattcaaaggtgcttggagtatgtggaccttgggcggggagaaaaaagccattggatgggaaaaaaatcggatgattgagtacatatccgtttcttcggtaacggctgctatgggttccgctcttacagcggctcacttttgaacagcgcaaaagtaagcaaaacgctcttaccccaacactcggcacctcgcctaggctcggtgtgcccgtaattcgacagtgatttggggggccgccgccccgcgccatccatggcgcggggcggctaagatcaaaatcaaaagcaaagcgcggcggccgaatagccgaccgaatcgttgaagcgtacgcgctcccctgtaggagccgggcttgcccgcgaaggtcgttaaagatgacgcgggaaaccagaatgaacgcggcgcgctcactggttttagggctgcttcgcagcccaacgcggggcaagcccgctcaccacagtaaagcggttacacggaacaaaaaacgtatctgcgatgcgcagcgagtcgctcttgcttgtgatcttcggcgccccgtcaaacacgctggccgaacgcaggcttgaatccgtgggtaactcggcaggacgccgggttagccgcactgggccaaggatggcccattgcggcggcccacggattcaagccggagagagggcacaccgagcctacgcgaggtgccgagtgttggggcgaagcgtttttggttactttttgcgctcttcaaaaagtgacccgctgtaagagcggaacccatagcagccgttgccgcagaaatggatatgtacccaaaccccaatcaactcttatgcaacttactcatcaactgcgcctcagcctgcgtcaacccacacgactgcgtcagctcatccaccgtagcccccatccccaccagcttcgccgcctgcgcaaacgaaagactcgaaggatcgcgctgctcaatctgcgccagcttatccggcaacggcgcaagaatcgcacgcaactcatgcacctcgtccccgaccttcaccgcactctgctgaaagtgatcaacccgcttcaccaactccagcacccgccggtcacgcacagcatcacgctcagcctgctgtagcaacaactcgcgctgctgacgcacgtagcgcaacaggaatgccagggtcccggcccataacagggccaggacaatcaccgcggcctcaaggaacaatcagatgctctccagttccgaccactcttcttcgctcatcatcttgtccagctcaaccagaatcagcagctcgccgttcttgttgcacacgccctggatgaacttggcggattcttcgttacccacgttcggcgcggtttccacttccgattggcgcaggtagaccacttcggccacgctgtcgaccatgatcccgaccacttgcttgtcggcctcgatgatgacgatacgcgtgttgtcgttgacctcggtcggtaccaggccgaagcgctggcgggtgtcgatcaccgtcaccacgttgccgcgcaggttgatgatgcccagcacgtagctcggcgcacccggtaccggggcgatctcggtgtagcgcagcacttcctgcacgcgcatcacgttaatgccgtaggactcgttgtccagtttgaaggtcacccattgcaggatcggatcatccaaaccttgtgcggacgctgacttattcatacccctgaccccttcaagattggccacgcaccagcgtggaccttattgttcaatcaactgcgtttagtaaccggcatcgttttaaccgcgccactggcgatcaactcggccagttcggcgacgtcgagcaacgcgcacatgtgttcgatcacggtgcccgccagccaaggccgttggccccggtggctgcgccatttgatttcgttcgggtccaggcgcaacgagcggctgacttgatgcaccgccagcccccactcgtagccctgcaccgagatcacgtattgcaaaccctggcggaagtcgtcgcggtagcggtcgggcatgacccagcgcgcggtatccagcactttcaggttaccggcctggctcggcaggatgccgaggaaccactccggttgcccgaacagcggcgtcaattcctggccttccagggaatagatcgagcccaggcacaccagcggcaccgccagcgtcaagccggcgacgtcgaacaacaggcattcgaacggctcggcagcccagctcgggcgatcatcaccggtgaccggcggcggtgtgatgctcggcggcaggtgcacttccaccaccggctcgaccaccacgggggcaatcaccaccggagcaatcggcacgacgacaggcacaacctgcgcatcgcgggcctgttcttccaggacggccagctggaattcatccagcgtgctttccggttctacaacggcaggctccaataccaggatcggttccggcagcgcttcctcggtcgcgtcctgcagcagggcatccaggtaggattccagcgccagttgcggccgggtcttgagttcgacgggacggttcatcacgccacctgcgccacaagctgctgcgacagcaggtgtttgagcaacgcgcggtaggccagtacgccacggcttttcgcgtcgaactgcgacggcgccaggccggcgcggctggcgtcacgcaggcgcgtgtccaccgggatatagccgttccagatggtgtccgggtaggcatcgcgcaatacgcgcagggtgccgagggacgcctgggtgcggcggtcgaacaaggtcggcacgatgctgaacggcagcgcctgtttgcgcgagcggttgatcatcgccagggtgctgaccatgcgctccaggcctttgacggccaagtgctcggtctgcaccgggatcaccagttgctggctggccgccaaggcgttgaccatcagcacgccaagcaacggagggctgtcgatgatcgcgtagtcgaagtcctgccacagttgcgccagggtcttggcgatcaccaggcccaggccgctctgccccggtgactggcgctccagggtcgccagcgcggtgctggagggcagcagggaaatgctttcgttactggtgggcaacagcagttgcccgggcagatcggccggcacactgcccttgtgcaggaacagatcgtagttgctgtgttccagcgcatccgggtcgtagccgaaatagctggtcatggagccgtgagggtccaggtccaccacgaccacacgcttgcccgcctcggccagcaagccggctaaggcgatggaggtggtggtcttgccgactccacctttttgattggcaactgcccagactctcattcggttggttcctcccggcaggcacaggcgcgaccgagacattgcatggggttattgagccggcgacggagaattgacggcactctgtcgaaccggcggttttaccggggccggtgcagtttgtgtgccagcccgcttcaaggccgcatccggtgttgcattagcggtgccggtgccggtcaggctgcggcgcacatccaggttgcgcgacaccaccagcaccacccgacggttacgcgcgcggccttccgccgtggcgttattggccaccggctggaactcgccgtagcccacggacgccaggcgaccagggttaacgccctgcatcgcgagcatgcgcacgatgcttgaagcgcgggccgaggacagctcccagttggtcgggtactgcgcggtgctgatcgggaaattgtcggtgaagccttcgacatggatcgggttttcaaatggcttgaggatcgccgccaccttgtcgatgatggtgaacgcctggtcactgggcaacgcatcggcactggcgaacagcaggctggaattgagttcgatctccacccacagctcattaccgcgcaccgtcatctggttggagctgatcaggtcgccaaacgccgcgctgatgtcgtcggcgatgcttttcagcgggtcgctggtgccgcccacgccggcagcggtttcatcgctgtcgttgaccagcggcttggccggggtcacggtcttgggcctctcttcaccgatgggaatcggcttgagcgcacggtcggcgtcgttgaacacgccgatcagcgcctgggaaatgactttgtacttgccttcgttgatcgacgagatggagtacatcaccacgaaaaacgcgaacagcagggtgatgaagtctgcataggacaccagccaccgctcgtggttgacgtgttcttcaggctcgcgacggcgacggctcacaatacatacctcccatcaatccatgaagccctggagcttcaattcgatggaacgcgggttctcgccctcagcgatcgacaggatgccttcgagcagcatctcgcgataacgcgactggcgcatggcaatcgacttgagtttgctcgccaccggcagcagcaccaggttggcactggccacgccgtagatggtcgcgacaaacgccacggcaatgccgctgcccagttgcgatggatcggcgaggttgcccatcacgtggatcaggcccatcaccgcaccgatgatgccgatggtcggcgcgtagccgcccatgctttcgtagactttggcggcgttgatgtcgcggctttcctgggtgtagaaatccacttccaggatgctgcggatcgcttccggctcggcgccgtccaccagcaattgcaagcctttgcgtgcgtagctgtcgggctcggcatcggccacgccttccaggcccagcaggccttccttgcgcgcggtgaggctccagttgaccacgcggtcgatgccgccgggcaggtccacgcgtggcgggaaaatgatccatatcagaatctgcatggcgcgcttgaacgagctcatgggcgattgcaacaacgccgcgcccacggtgccgccgatcacgatcagcgccgccgggccgttggccaacgcaccgaggtgcccgccttcgaggtagttgccgccgatgatcgcgacaaacgccatgatgatgccgatcaggctcagtacatccatcagaggcaggcctccaccagatgcttgccgatgtcgtccaggctgtagacggcgtcggccaggtccgccttgacgatggccatgggcatgccatagatcacgcagctggcttcgtcctgggcccagatggcgctgccgccctgcttgagcaggcgcgcaccttcacggccgtcggcgcccatgccggtgagcactaccgccagaactttgtcaccgtaggacttggctgccgaaccgaaggtgatatccacgcacggcttgtagttgaggcgctcatcgcccggcaggattttgatcgcgccacggccgtcgaccatcatctgcttgccaccgggggccagcagcgccaggccagggcgcaggatgtcgccatcctcggcttccttgacgctgatgcggcacagcttgtccaggcgctcggcgaaggccttggtaaacgccgccggcatgtgctggatcaatacgatcggcgccgggaagttggctggcagttgggtcaacacgcgttgcagcgcaaccgggccacccgtggaggtgccgatggcgaccagcttgtaggccttgcgcttgggtgcgggcgaatgagccgacgccgcaggtgccagcgtgcgagcgggtgccactgcaggccgtgtcactggcgcaggcgcagggcgcgcaaacgacgacgtcggtgcagcgggagccggtgctggcgcagcggttggagtaggcgtgctgaacaggctgcgacggttactgcgcgaaatgctgtgcaccttctcgcacagcatctgcttgaccttctcggggttgcgcgagatgtcttcgaaattcttcggcaggaagtccaccgcaccggcgtccagcgcatccagggtgacccgggcgccttcgtgcgtcagcgaggaaaacatcaggaccggggtcgggcagcgttgcatgatgtgccggactgccgtgatgccatccatcatcggcatctcgtagtccatggtgatcacgtccggtttcaacgcaatggcttgatcaatcgcctctttgccgttggtggccgtgccgaccacctggatcgttggatcggcggaaagaatttccgagacgcggcggcggaagaaacccgaatcgtccaccaccaggaccttgactgccataaacactccgttaggcggggcgggcactaccgccctgccccaccagaatcaaatacgccgagcggcgtaacgcttgagcatgctcggaacatcgagaatcagcgcgatccgaccgtcaccggtgatggtcgcacccgacatgcccggggttccctgcagcattttgcccaaaggcttgatgaccacttcttcctggccaaccagttgatcgacgacaaagccgatgcgctgggtgcccacggacagaatcaccacatggccttcgcgctgctcttcatgggccgccgatgccaccagccagcgcttgaggtagaacaggggcaatgccttgtcgcgcacgatcaccacttcctggccgtccaccacgttggtgcgcgacaggtcgaggtggaagatttcgttgacgttgaccagcgggaaggcgaacgcctggttgcccagcatcaccatcagggtcggcatgatcgccagggtcaacggcaccttgatgacgatcttggagccctggcccttggtcgagtagatgttgatcgagccgttgagctggctgatcttggtcttcactacgtccatgccgacgccacggccggacacgtcggaaatctcggtcttggtcgagaagcccggggcgaagatcaggttgtagcattcggtgtcggtcaggcggtcggcggcgtccttgtccatcacgccgcgcttgaccgcaatgttgcgcaatatggtcgggtccatgcctttgccgtcgtcagtgatcgacagcaggatgtgatcgccttcttgctccgccgccaggatcaccttgccgccacgggacttgcccgaggcttcgcgctcttccggggtttccacgccgtggtcgacggcgttgcgcaccaagtggaccagcgggtcggccagggcctcgaccaggttcttgtcgaggtcggtttcttcgcccaccagttccaggttgatttctttcttcagctgacgcgccaggtcgcgaaccaggcgcgggaaacggccaaagactttcttgatcggctgcatccgcgttttcatcacggcggtctgcaggtcggcggtgaccacgtcgaggttcgacacagccttttgcatggcttcatcgccgctgctcaggcccaggcgcaccaggcggttacgcaccagtaccagttcgccgaccatgttcatgatgtcgtccaggcgcgcggtatcaacccgcacggtggtttcggcttcactggcaggcttctcggctgtcggcgcggcggcggcacgtgccggagcaggtgcggcggccggggccggtgctggcttggcagccggtgcaggtttggcggccggcgctggcgcagcggccttggcggcgaccggtgcagcggtcgccaccgctgcggccggggccacttcgctgaacttgcccttgccgtgcaactcgtccagcagggattcgaactcgtgatcggagatcagcccatcgcccgcaggggcggcgctggcagcagccggtgccgcagccgtggcggcgacttccggcaaggcgtcggccgcgaaggtgcccttgccatgcagttggtcgagcaatgcttcgaattcatcgtcggtaatgtcggtgctggcgctggccgccggtgcatccgcaggagcagcagcaggtgccacggcgtcggccgcgaactggcccttgccatgcaactggtcgagcagcgattcgaactcggcgtcggtgatgtcttcgctggtcggtgcggcgaccggggcagccggcgcttccgcctcggccttgacggcactgagggagttgagcagctgttcgaactcgctgtcggtcacatccggctcggcctcaaccacaggctccggtgcggcttcaaccaccggtgcggccgacgtgtcggcaggttccgccaggcgcgccagggcggccagcagttccggagtggccgccgtgatcggtgcacggtcgcgcacctcgctgaacatgccgttgaccgcatccagtgcttcgagaatcacgtccatcaactccgaatcaacgtgacgctcacccttgcgcaggatgtcgaacacgttctcggcgatgtggcagcactccaccagctcatggagctggaggaagccggcgcccccttttacagtgtgaaaaccgcgaaaaattgcattgagcaggttcgcatcatccggtcggctttccagctcgaccagttgctcggacaactgctctaaaatttcgccggcctctacaaggaaatcctgaaggatttcttcatcggcgccgaagctcatgtgggtgctccttagaagcctaaactggataacaggtcatcgacatcatcttgacccgatacaacgtcttcacgtttatcggcatgaatctgcggaccttcacccttggcgagatgtttttgtggatctttttccgagaggatcgcttcgcggtcatgttcgatgccggcgaaacggtcaacctggccagccataagcaccaatttgagcaagttgctttccacttcggtgaccaactgggtcacacgcttgatcacctgaccggtgaggtcctggtaatcctgggccagcagaatgtcattgaggttgctggaaaccgtgcggttttcctgctcgctgcgtgacaggaaaccgtcaacccgacgtgccaactcgcgaaactcctcagcccccacttcccggcgcatgaagcggccccagtcgtggctcagggcctgggcttcagtggccatgccgttgaccagaggcgtggcgttttccaccaggtccatggtgcggttggccgccgcctcagtcagcctgaccacataggacaggcgttcggtggcatcggtgatttgcgagatttcttcggcctggggcatatgcgggtcaatctggaaattgacgatcgcactgtgcagctcgcgtgtgagcttgcccacttcctgatacaggccgcggtcacgggtctggttgagctcatggatcaactgcaccgcgtcgccgaactggcctttttcaaggctgtcgaccaactggtgagcatgctttttcagggtcgactcgaagtctccctgtgacgtttctttatgctccatagctcccccgcgatggcattagccgtggatgcgttcgaagattttttcgatcttctctttcaaggccagtgcagtgaatggcttgaccacgtaaccgttgaccccggcctgggcggcttcgatgatctgctcacgcttggcttcggcggtcaccatcagcacaggcaggctgcgcagcttttcgtcagcgcgcacgtggcgcagcaagtcgataccggtcatgcccggcatgttccagtctgttaccagaaagtcgatgctcccgctgttgaggatcggaatcgccgtaatgccgtcgtccgcctcgaccgtgtttgtgaacccaaggtcacgcaacaggttttttatgatccgccgcatcgttgagaagtcatcaacgatgaggattttcatgttcttgtccaattcgacctccaagcagtcttaaacgcgcccagcacctggacgcgccatttcaatcaacaggcattacacaaaaaggactgccgggggcaccacgggtcgaacccgcgaaggccggttgccctcgcggtatcgtctgcagtgtccccacactgcctgttcagcgcgctcgccactctcccaagcgcccccgcaagcgggctgcgcactggctgtgcaactggctgacccgcgattcgctgacacccaggacctcaccgatttccttgaggttcagctcttcgtcgtagtacagcgccaacaccagccgctcacgctccggcaaattggcaatcgcgtccgccaacgccccctggaaacgctcatcttccaggtctcgcgatggctccatatgagcactcgcgccgtcctcgtgcagcccttcatgttcgccgtcctgcaacaggtcgtcgaaactgaacaatcggctgcccaaggtatcgttcaaaatcccgtagtaatcgtcgagactcaattggagttcggccgcaacttcgtgatctttagcgtcgcgaccggtttttgcttcaattgcgcgaattgcgtcactgaccatgcgtgtattgcggtgtaccgaacgcggcgcccagtcacccttgcgcacttcatcgagcatcgcgccacggatgcggatgcccgcatacgtctcgaaacttgcacccttgctcgcgtcgtatttggtcgacacttcgagcaagccgatcatgcccgcctggatcaggtcttcgacctggacgctggcgggcaggcgcgccagcaagtgataggcaatgcgcttgaccaggggcgcgtagcgctcgatcaactcgccctggctgtcacgggcagacttcttgtacgcgttgtagccggtcgctgtcatagcacgggtcctgcgctcgtctgatgcaccaatcgctcgacgaaaaactccagatgcccccgggggttggcgggcaatggccaggtatcgaccttctgggcaatagccttgaacgccagtgcgcacttggaacgagggaacgcttcgtagactgcacgctgcttttgcacagccttgcgcacacactcgtcgtagggaactgcgccgacgtattgtaaggcgacatcgaggaaacgatccgtgaccttggtcaacttggcgaacaggttgcgcccttcctgcgggctctgggccatgttggccaggacgcggaagcggttcatgccgtagtcgcggttaagcagtttgatcagggcgtaggcgtcggtgatcgaggtgggttcatcgcagaccaccagcaacacttcctgcgcagcgcgcacaaagctgaccacggactcgccgatcccggcggcggtgtcgatcaccagcacgtcgaggttgtcgccgatgtcactgaacgcctggatcagcccggcatgctgcgccgggctcaggtgcaccatgctctgggtgccggaggcggccggcacgatgcggatgcccccaggcccctgcagcagcacatcgcgcagctcacagcggccctcgatcacatcggcaagggtatgtttgggcgtcagccccagcagaacgtcgacgttcgccaaccccaggtcagcatccagcagcatgacgcgacggccaagctctgccagggccagggacaaattcactgacacgttagttttcccgacgccacctttgccgccggtcaccgcgatcacctgtacgggatgcatgctgcccattttatttctttaccttgtcttgcttagacgcaggctacatggcttggccgcgtgaatcgcttgcagaccatcgatgtagatacatttcacggtgttcataccgccctcaacctacccgcttcgccgggttgtggtagaggtcggcgaacatatcggccatcgcttcctcgctaggctcgtcttgcatttgcacgctgactgcacggctgaccaactgatgacggcgcggcagatgcagatcatccgggatccgcggcccgtcggtcaggtaggcgaccggcaattcatgactgatggccaggctcagcacctcgcccaggctcgcggtttcgtcgagcttggtgaggatgcaaccggccaggccgcagcgcttgtaactatgatacgcagcggtaagaacctgtttctggctggtggttgcaagcaccaggtaatttttcgacttgatgccacgcccggccaggctttccaactgcatgcgcaatgccgggtcgctggcttgcaggccggcggtgtcgatcagcaccacgcgcttgcgcagcagcgggtcgagggcgttggccagggactggcccgggtcgacatgggtcaccgacacattgagaatgcggcccagggtcttgagctgctcctgggcaccgatacggtagctgtccatgctcaccagcgcgatattctgcgcgccgtacttgagcacgtaacgcgccgccagcttggccagggtggtggtcttgcccatgccggcagggccgaccatggcgatcacaccgccctcttccaggggttcgatttcgggggtggcgatcatccgcgccaagtgggccagcaacatgcgccaggcctggcgaggctcttcgatttcggtggtcagggccagcaggtcgcgggacaacgggccggacaggccgatgcgttgcaggcgacgccacaggttggcctgttgcggtttgctgccttgcaattggttccaggccagcgaacccaactggacttcgagcagctcacgcaggccattgagttcaaagcgcatcgagtcgaacacacgctggtcaaccgccgctgccggggctggcgcagcgggacgcggcggctctttgaaggttggctcaaccaatggctccgcggcggtcagcggcaggccggcgaacaactggcgattggtggtggcatcgctgtcgccacgcatgctcagttcagcctgggccgaaacaatccgcgaagcggtcttgcgcagctcgtcttcgagctccatgttcggcacgcgcggcgccaaggccgaaggtgtgtaatccagggcagccgtcagctcgacaccgccggcaatacgacggttgccaataatcgcggcgtcggcgcccagctcatcacgaaccagtttcatggcctgacgcatatcggcggcgaaaaaacgcttcacttgcataacccactaccctcagccgttgggccctactgtcgcgacgatagtcacttgcttgttgtcaggaatttcctgataagccaaaacgtgcaaattcggtactgccaggcgcccaaaccgcgacaacatcgcccggaccgggcctgccaccagcaggatcaccggttggccttgcatttcctggcgttgcgcggcgtcgatcaacgaacgctgcagcttctcggccatgcttggctccagcagaacgccctcttcctggccttgtcctgccttctgaatactattgagcaatatttgttccaacctgggttccaaggtgatcacaggcagctcggagtcaagccctacaatgctttgcacgattgcgcgcgacaatccgacgcgcaccgaagccaccagggcggcagtatcttgactcttggcggcattgttggcgatagcctcggcaatgctgcgaatatcgcgcaccggcacctgttcggccagcagcgcctgcaacaccttgagcaactgcgacagcgacaggatgcccggcaccagctcttcggcgagttttggcgaggctttgccgagcaaacccatcaattgctggacttcttcgtggccgatcagctcgtgggagtgcttgtagaggatctggttgaggtgggtagcaaccacggtgctggcgtccaccaccgtgtaacccagggactgcgcctggctgcgctggctgatttcgatccacaccgcgtccaggccaaaagccggatctttggcggtaatgccgttgagactgccgaacacctgccccgggttgatcgccagttcgcggtccgggtagatctccgcttcggccaggatcacgcccatcagggtcaggcggtaggcgctgggcgccaggtccaggttgtcgcggatatgcacggtgggcatcaggaagcccaggtcctgggacagcttcttgcgcacgcccttgatccgcgcgagcaactggccgccctggttgcggtccaccagcggaatgaggcggtagccgacttccaggccgatcatgtcgatcggggtcacgtcatcccagcccagctccttggtttcctgggcgcgggccggggatggcagcagttcctgctggcgtgcaatctcctgctgggcctggaccttgaccgcattctgctttttccagaacaggtaggcaccgccggccgccatggccgccatgctcaggaaggacacatggggcatgcccggcacgatgcccatgatcgccatgatgcccgccgccacggccagggccttgggcgaggcaaacatctgccggctgatctgcttgcccatgtcttcggagcccgatgcacgggtcaccatgatcgccgctgctgtagataacaacagtgatggcaattgcgccactaaaccgtcaccgatggtcagcaaggcgtacaccttgcccgcatcgctgaaggtcatgccgtgctggaacatgccgaccgccacgccgccgatcaagttgatgaacagaatcagcaggccggcgatggcgtcaccgcgcacgaatttgctggcaccgtccatggaaccgtagaactcggcttcctgggccacttccaggcggcgtgacttggcttggttctggtcgatcaggccggcgttgaggtcggcgtcgatcgccatttgtttgccgggcatggcgtcgagggtaaaccgcgcgctcacctcggaaatccgcccggcgcccttggtcaccaccacgaagttgatgatcatcaggatcgcgaataccacgataccgaccacgtagttaccgccgatcaccacctcgccaaaggcctggatcaccttgccggcggcggcatggccgtcctggccgtgcagcatcaccacgcgggtggacgccacgttcagcgccaggcgcagcaaggtggcgaccagcaggatggtcgggaataccgcgaaatccagcggccgcagggcgtacacacagaccagcagcaccacgacggacagggcaatgttgaaggtaaagaacacgtccagcaggaacggcggcatcggcaacatcatcattgccagcatcaccagcaacaacaacggcacacccagattgccccgcgagaggtcagtcagggtgctgcgcgccgtgccgagcatttgagagcgatccaccagtattcctcgtgtcctttgaagcaaagttttgacgcggttgggcgtcctgaaggcggtattgcaagaagccttccaacttttgttttggaacgtcgatcgctatggacgcccacgttttttcggaaagaacacattttaaatgtgggagggggcttgcccccgattgcagcttgccagactaagagtcggtgactgacacaacgccatcgggggcaagccccctcccacacttggatgtgcgcgcagccggtactactggggaaatttctgacaaggttttgcggttgcccctaggaaactcgctctctagtctccgtacaccgctgcaaacgcagtggtcgggcgtcgcggcccggatttccaaagagcaaaagcactatcgcccgctttcagttgacgcttttttagcgtctactgtgcggcgctatggcggctgtgcgcgggataccttcgggtatgccgggttgctccttgaccggtccgcgaacctgcgcacagctgtcaccccatcgcgtcgcggcgatcagtggcagctccacttttaaggagcctcacaatgatcaaacccaccccaaatccccccatcagtctgtttaccgtcgtagacactctcaaaaccgaagacctgctggtcaacctcaccgaaaccctcgcctcggccgacgcgctgatgagtgattttgcgtttgaattggaagggccaaaacgcgaaggcgcgctgggtgttgcacagttgattgggctggcaaagctgcttgccgacagagtgctggaggacagcgagcgcttgatggcgtgatggcggatcgttcctgcactaccctgcgggaacgatcatcaagctcataggacgcggacgttctcggcctgagcgcctttggccccctgcgttacctcgaactctactttttggttctcttcaagcgtcctgaaaccgtcgcccgtgatggccgagaagtggacaaatatatcgcccccaccgtcttgagtgataaacccaaaccccttctccgcgttaaaccatttcaccgtacctgttgccattgccgttctcctgatatctcactcaaggacttgctggatgaccctgacctcggaggcatggacgccatcgggtcgatggatcatctgaaacgccacctgcacccccactgcaagccggacgccgcgcgaaccaatgaggtccactggaacggcctcgccgtccacgacaatcaaaccctttccagttgcctggtcataggatgtgacgatgcctctgataacccgattcaaaaccactctccctgcatctcatttacagcctgcgcgcagtgcatagggcaatagaaccgcgagcagcgcagtctggctactgtgaagtttgacaggtagacgccagttatcgacgagtggtagggagggcgacccggtgtcaggaatcgcggcgcaggtccggcggaatcggcagatccttgagcggatcgggccgcttgcccttgcccgcacggtactggcgaatctgatagacatacgccagcacctgggccacggctaggtacagcccggcggggatttcctggtcgaggtcggtggaatagaagatcgaccgcgccagctccggcgattccagcagcaggatgtcgttggccaccgcaatttcgcggatcttcaaggcggtaaagtcgctgcccttggccagcagcatcggcgcgccgcccttctccgggtcgtacttgagggccacggcgtagtgggtcgggttggtgatgaccacgtcggcgtcgggcaccgaggccatcatcttgcgctgggacatctcgcgctgcagttggcgaatacgctgcttgacctcggggcggccttcctggtccttgtgttcgtcgcgcacttcctgcttggtcatcagcagtttcttgtggctttcccacagctggatcggcgcatccaccgcggcaatgatgatcaacccggcggccatccacagtgcgctccaacccaccacctgcacgctgtggatgatcgccgactccagcggttcatgggcgattcgcagcaggtcgtcaatgtcggacgacaacaccatcagcgccacgaacaggatcaggatgaacttggccaacgccttgagcagctccaccagggccttggtggagaacatgcgcttgagcccggcgccagggttcatgcggctgaacttgggcgccatgctgccggcggcgaacagccagccgcccagggcgaccgggccgatcagtgcggcgagcagcaaggtgatcaggatcggctgcaccgccaggatcgcgatctggcccgaatgcaaaaggtaccggcccatggcgtcgggattgagcagcacctcgcggggcaaggtgaagttgtgtttcatcaactccatcaggtccagcgccaggccgccgccgtagatcagtaacgcgccggcgccggccatcatggtggcgacggtattgagctccttggagcgggcaatctcgcccttttccctggagtcctttttacgtttctccgtggggtcttctgttttgtcctgaccactctcgctctcggccatggctcagcgcgcccgtgccagatcacgtaagaactgcagggcgtcggtcgccagcggttgatactgattgagaatgtcggccaggccgatccagaaaatccccatgcccaacaccagggtcaacgggaaaccaatcgagaagatgttcagttgcggcgccgcacgggtcatcaccccaaacgcaatgttcaccaccagcaacgcggtgatcgccggcagcaccagcaacagcgaagcgcccaatacccagccgagccgtccgacgatctcccagaagtgattgaccaccagccccgaacccaccggcaaggtggtgaagctttcggtcatcacctcgaaggccaccagatggccgttcatggccaggaacagcaaggtcaccagcatggtcaggaattgcccgatcaccgccgccgacacaccgttggtagggtcgaccatggaggcgaagcccatgcccatctggatcgagatgatttgcccggcgatcacaaaggcctggaaaaacagcgtgagggaaaagcccatcagcgcgccgatcaggatctgctcggcgatcagcagaaaggcactgaggtcgatggcattgaccggcggcatcggcggtaacccaggcacgatcaccacggtaatcgccaccgcaaagtacaggcgtacgcggcgcggtacgagtgtggtgccgaacaccggcatggccatgagcatggccgtcacccggaacagcggcaggatgaaggacgccacccaggtgctgatctgggtgtcggtcaacgccagcaaggactgcatcgggtcagccgatcaactgcggaatactgccgtacaactgcaggatgtattccatgaaggtctgcaccagccacgggccggcgacgatcagggtgaccagcatcaccagcaggcgcggcaggaagctcaaggtctgttcgttgatctgggtcgccgcctggaacatcgccaccaacaggccgaccaacaggctcggcaccaccagcacggcgaccatcatggtggtcagccacagcgcttcacggaacaggtcgacggctacttctggcgtcatcgcgctataccccgccgaaactgccggccagggtgccgataatcagcgcccagccgtccaccagcacaaacagcatgatcttgaacggcaacgagatgatcagtggcgacagcatcatcatacccatggccatcagcacgctcgccaccaccaggtcgatgatcaggaacgggataaagatcatgaagccgatctggaacgcggtcttcaactcggacgtaacgaacgccggtaccaggatggtcaacggcgcctggtccggggtggcgatgtcggtgcgcttggacaagcgcatgaacagctcaaggtcactggagcgggtctgcgacagcatgaaatccttgatcgggccctgggccttgtcgatcgcgtcctgggcggtcattttctccgccaggtagggctgcagggcttgctggttcaccttgtcgaacaccggcgccatgatgaacagcgtcaggaacagggccatgccggtgaggatctggttcgacggcgtctgctgcaggcccagggcctggcgcaggatcgagaacacgatgatgatccgcgtgaagctggtcatcagcatgacgaacgccgggataaagctcagcgcggtcatgatcagcaggatctgcaggctgaccgaatactcctgcgcgcccgccgcgttggtgcccaacgtgatcgccgggatcgacaacgggtcggcgccgaacgccaatggcgcggccagcaacagcatgagcgtcaataaaacgcgcattacttcttatccttctgatccttgcccagcaactccatcaggcgctgggcgaattctggcgtggcggactgactctgatccacgctcaccggggtcttgagcacgtgcaacggggtgatgcggccaggagtgatgcccagcaggatctgctcctcgcccacctgcaccagcaccagccgatcacgcgggccgagggcgcgcgaaccgatcatctcgatcacctggccgttgcccggccctacccgctgcacgcggcgcatcagccaggccagcacgaatatcagcccgaccaccagcaacaggcccagcaccaactgggtcaattgcccgccgatgccactgctcaccaccggtgcggctaccgctgtcgcttgcgcggccggctcagccgcgagggcgctcaatggcagcgccagaaacagtcccgccatcgaatacttcatatcagcgcaacttcttgatgcgttcgctcgggctgatcacgtcggtcaggcggatgccgaacttttcgttgaccaccaccacttcgccgtgggcgatcagggtgccgttgaccagcacgtccagcggctcgccggccaggcggtcgagttcgatcaccgagccctggttgagttgcagcaggttgcggatgttgatttcagtgctgccgacttccatggaaatcgacactggaatgtcgaggatcacatccaggttcgggccatcgagggacaccggctcgttgtttttcggcacgctgccgaactcttccatgggcaggcggttgccggccggtgcggtggcggcgtcagcagccagcagcgcgtcgatatcgtcctggccaacatcgccggtttcttccagggcagccgcccattcgtcagccagggcctggtcttcggcggaagtgttttcgtgttcggtagccattacatgtcctcggcggagcaaacattcataaataggagtgaatcagcggcggttgatcggctcgaccacctgcagcgccaggttgcccttgtgggaaccgagcttgaccttgaatgacggcacgccgttggcgcgcatgatcatttcttccggcaattcgaccgggatgatgtcccccggctgcatgtgcaaaatatcgcgcaggcgcagctgacgacgggccacggtggcgctcagcggtacgtcgacgtccagcaggtcttcgcgcagggccttgacccagcgttcgtcctggtcgtccaggtcggactggaaaccggcgtcgagcatctcgcgcaccggttcgatcatcgagtacggcatggtcacgtgcaggtcgccgccaccgccatcgagttcgatgtggaacgtggacaccacaatggcttcgctggggccgacgatgttggccatcgccgggttcacttcggagttgatgtactcgaagttgacttccatgatcgcctgccaggcttccttcaaatcgatgaaggcctgctccagcaccatgcgcaccacccgcaactcggtgggggtgaactcccggccctcgatcttggcgtggcggccgtcgccgccgaagaagttgtccaccagcttgaacaccagcttggcgtcgaggatgaacagcgcggtgccgcgcagtggcttgatcttgaccaggttgaggctggtgggcacatacagcgagtgcacgtactcgccaaacttcatcacctgcacaccgcccaccgccacgtccgccgaacggcgcagcatgttgaacatgctgatgcgggtgtaacgggcgaaacgttcgttgatcatctccagggtcggcatgcgtccgcggacgatacgatcctggctggtgaggtcataacttttgacgctgccgggctcggcagccatttcggtctgtaccagaccatcgtcgacgccatgcaacagcgcatcgatttcatcctgggacagcaggtcttgcacggccatgtcgtgatcctactgcaatacgaagttagtgaagagcgcctgctcgaccacgactttgccgagctccttctgggccacttcctgcacgctggccgtaaccttctggcgcagcatttcctggcccaccggggtggcgagtgtgtcgaagctctggctggagaacagcatgacgaggttgttgcggatcacgggcatgtgcaccttgagggcgtccaggtccgcagcgttacgcgccagcaaggtgatgctcacctgcaagtagcgttgacgaccgttctgattgaagttggcgacaaaggccggaagcatcggttcgaagattgccggttgcttgacgttagtggcggtttcagcggcgggtgccggcttgctggcactgctgtgcatgatgtaccaagtgccgccgaccgaggcgccgatggccaggagcaggcccaggactatcaacaggataagcttgagcttgcctttgcctgcgggtgcttttgctgcgtcgtcgctcttcgccatgccaataatccgtcactattcggggattcatagatctacggaaaggcaagagcaagtgttatgccagagttgtctggtcatttgggaagagaggacaccaaaaatcaaatgtgggagggggcttgcccccgatagcggtgtatcagtcacccatgtttcagctgacacagcctcatgggggcaagccccctcccacatttcgtccggatcaggcgtagtagtcgaccgcactggagccgattacggttgaggtgaccggcgtcacggcttcagccacatcaaggtggttgccgctgtcgccattgtcaccaccgcgcccgccgctaccgctcacaccacgggtctgggcctgctgctgttgttgctcctgcccacgggactggtccgacacgttcacgtccacctggcccatgccctgctgggcaaacatctcccgcaagcgcccggactggctttccaacgcttcacgcactaccgggtgggcactcatgaagttgacctgggcctgttggtcggcggtcatgttgaccttgatatccaggcggccgagctcagcgggttgcaactggatctccgccgacttgaggttggcgctggacaggtacatcacccggttgacgatttcgtcggtccagccgctctggtgcatggccaatggtgcattggtcaccggtggcaaggcgttggcggttttcggcgtggccgcctgggtcaatgcggccaggcggttggcgaagtcatcgacacgggtgtcgctgctggcgttcttcaggtccttgagaccgtcttcgatcaacccgctgaaagccttgtcgccgccctggtcggtgctgtccttggtggcttgctggtcgaccatattggcgaggccagcggcgaaattctgcgcggcggtgggttgatcctgagtcggtgccggagcgctttttgcctgcgcctggctgctggccgatacgtgaccgccctgctccatcgccaggcgcacggctggcatggcatccaggggatcagcctccggatcgaacgcgggcttggcctcctcggtcgcggcgaccggcgccgcgaccactggctgggttttgtcatccttggcggtggtaacgggcgcgggtgtttcaaccggcaccggcacggctaccggggtgacggtggcaatcaatgccgggtcgaccaccgggtcggccggaggctgctgcaccagggtcgggtcggctggcgcgtcatcatccttgctggcgctgtcgtcggttttggccggcggcgtggcaggcaaggtattgccgctatcggcaacggctggcgtgctggcggcaggcttgtcattgcccgctgcaggcttggcgctggcatcggacgacttgcctgcggtgggtttggccgagctgtcgtcggtcttgaccgaaggtttggacgcctggttggcaaacacttgagcgaagccagggcccttgtcccgtgggtccgcagccgctgccggtgggttggcagagggcgcttgaggcttggccgcgggggcagcctgaaggagcgaattgggggcgactggcataggtaaaggtctccactgcatgggggtcggggatgcagtaactggaggtagagcaagagttgggccaggttttgggttttgtgtgtatatccattatttgggcaacggcggcttatggttccgcccttacggcggctcacttttgaaaagcgcaaaagtaagcaaaacgctcttgccccaacactcggcacctcgcccaggctcggtgtgcccgtaatccga

(The sequence listing continues in the following parts.)

1. A composition comprising a microbial strain, an extract produced by culturing the microbial strain, or any combination thereof, and at least one excipient, diluent, or carrier,
wherein the microbial strain comprises a genome having DNA sequence exhibiting at least 85% sequence identity to one or more of SEQ ID NOs: 1-31,
wherein the microbial strain comprises a genome having DNA sequence exhibiting at least 85% sequence identity to one or more of SEQ ID NOs:32-76,
wherein the microbial strain comprises a genome having DNA sequence exhibiting at least 85% sequence identity to one or more of SEQ ID NOs:77-107, or
wherein the microbial strain comprises a genome having DNA sequence exhibiting at least 85% sequence identity to one or more of SEQ ID NOs: 108-137.

2. The composition of claim 1, wherein the microbial strain is deposited with the WDCM as WDCM1247, WDCM1248, or WDCM1247.

3. The composition of claim 1, wherein the microbial strain is frozen, lyophilized, or is present as metabolically active cells.

4. The composition of claim 1, wherein the microbial strain is present in an amount of from about 109 to about 103 colony forming units per mL.

5. The composition of claim 1, wherein the microbial strain is present in an amount of from about 109 to about 108 colony forming units per mL.

6. The composition of claim 1, wherein at least one excipient, diluent, or carrier confers increased stability, wettability, dispersibility, or adherence to a substrate relative to a composition lacking the carrier.

7. The extract of claim 1, wherein the extract is produced by:
(a) culturing the microbial strain in a culture medium; and
(b) filtering the culture medium.

8. The composition of claim 1, wherein the composition comprises an emulsion, a colloid, a granule, a pellet, a powder, a spray, a suspension, or a solution.

9. The composition of claim 1, wherein at least one excipient, diluent, or carrier comprises a surfactant, a solvent, an emulsifier, a buffer, a cryoprotectant, a salt, microbial culture medium, a wetting agent, a bulking agent, an anti-caking agent, a thickener, a clay, a mineral, a lipid, a gum, a dye or colorant, a biological waste material, or any combination thereof.

10. The composition of claim 9, wherein the surfactant comprises polysorbate 20.

11. The composition of claim 9, wherein the solvent comprises water.

12. The composition of claim 1, wherein the composition further comprises an effective amount of at least one additional active ingredient.

13. The composition of claim 12, wherein the additional active ingredient comprises a fertilizer, a pesticide, an herbicide, or any combination thereof.

14. A crop legume seed coated with the composition of claim 1.

15. The crop legume seed of claim 14, wherein the seed is a soybean or edamame seed.

16. The crop legume seed of claim 14, wherein the composition further comprises a binder, filler, adhesives, adjuvant, thickener, or any combination thereof.

17. A method for increasing crop legume plant growth, the method comprising applying the composition of claim 1 to a soybean plant or seed, so that the treated plant or plant derived from the treated seed has increased growth compared to an untreated plant or plant derived from an untreated seed.

18-27. (canceled)

28. A plant treated using the method of claim 17.

29. A method for extracting plant growth promoting rhizobacteria (PGPR) from nodules of a crop legume plant, comprising
(a) mechanically cleaning the external surface of the nodules to remove soil and debris without damaging the nodule barrier that protects the nodule interior;
(b) sterilizing the surface of the nodules with a bleach and ethanol solution to lyse and kill bacterial cells and denature DNA;
(c) washing the nodules to remove the bleach and ethanol by repeated washings;
(d) testing surface of nodules to ensure sterility, wherein if the nodules are not shown to be sterile then repeat sterilization and washing steps;
(e) extracting endophytes from the nodule and plating them on KBC to grow Pseudomonas spp.; and
(f) selecting colonies for Pseudomonas with different morphologies and streaking these colonies to isolate PGPR bacterial variants.
